(19) United States
(12) Patent Application Publication
(10) Pub. No.: US 2025/0188405 A1
(43) Pub. Date: Jun. 12, 2025

(54) SINGLE CELL PROTEIN WITH ENHANCED DIGESTIVE ENZYME CONTENT

(71) Applicant: LanzaTech, Inc., Skokie, IL (US)

(72) Inventors: James Clomburg, Chicago, IL (US); Sean Simpson, Auckland (NZ); Alex Chou, Lincolnwood, IL (US); Natalie Gayner, Chicago, IL (US); Stephanie Jones, Evanston, IL (US); Timothy Politano, Chicago, IL (US)

(21) Appl. No.: 18/977,438

(22) Filed: Dec. 11, 2024

Related U.S. Application Data
(60) Provisional application No. 63/608,786, filed on Dec. 11, 2023.

(51) Int. Cl. C12N 1/20; C12N 9/16; C12N 9/54

(52) U.S. Cl. CPC C12N 1/20; C12N 9/16; C12N 9/54; C12Y 304/21062

(57) ABSTRACT

The present disclosure relates to single cell protein (SCP) products obtained from Cupriavidus necator that has been engineered to produce digestive enzymes or otherwise enhanced. The biomass produced by the C. necator and the SCP products that include it contain digestive enzymes that are not naturally produced by C. necator.

### CROSS REFERENCE TO RELATED APPLICATIONS

[0001] This application claims the benefit of U.S. Provisional Patent Application No. 63/608,786 filed on Dec. 11, 2023, the entirety of which is incorporated herein by reference.

### REFERENCE TO A SEQUENCE LISTING

[0002] The application contains a Sequence Listing which has been submitted electronically in ST.26 Sequence listing XML format and is hereby incorporated by reference in its entirety. Said ST.26 Sequence listing XML, created on Nov. 12, 2024, is named LT294US1-Sequences.xml and is 7,384,282 bytes in size.

### BACKGROUND

[0003] The following discussion is merely provided to aid the reader in understanding the disclosure and is not admitted to describe or constitute prior art thereto.

[0004] Cupriavidus necator is a type of bacteria commonly used for the production of single cell protein for food and feed applications. It is generally high in protein content with a favorable amino acid profile. However, some components of single cell protein compositions may be difficult to digest for some animals or humans.

### SUMMARY

[0005] The present disclosure provides nutritionally enhanced single cell protein (SCP) that includes digestive enzymes.

[0006] In one aspect, the present disclosure provides strains of Cupriavidus necator, comprising a transgene encoding a heterologous digestive enzyme, wherein the strain of C. necator synthesizes at least one digestive enzyme that is not natively produced by C. necator. The at least one digestive enzyme may be selected from a protease, a carbohydrase, a lipase, a phytase, and any combination thereof.

[0007] In another aspect, the C. necator strain comprises a second transgene encoding a second heterologous digestive enzyme selected from a protease, a carbohydrase, a lipase, a phytase, and any combination thereof. In yet another aspect, the C. necator strain comprises a third transgene encoding a second heterologous digestive enzyme selected from a protease, a carbohydrase, a lipase, a phytase, and any combination thereof.

[0008] In another aspect, the present disclosure provides a C. necator strain that expresses one or of more heterologous digestive enzymes selected from a protease, a carbohydrase, a lipase, a phytase, and any combination thereof. In some aspects, the C. necator strain expresses at least two heterologous digestive enzymes selected from a protease, a carbohydrase, a lipase, a phytase, and any combination thereof. In yet another aspect, the C. necator strain expresses at least three heterologous digestive enzymes selected from a protease, a carbohydrase, a lipase, a phytase, and any combination thereof.

[0009] For the purposes of the present disclosure, the protease may include a serine protease, a cysteine protease, or an aspartic protease. The carbohydrase is a cellulase, a β-glucanase, a xylanase, a mannanase, an amylase, a pectinase, a glucosyltransferase, or a galactosidase.

[0010] The heterologous digestive enzymes of the present disclosure may be from a bacteria, a fungi, a cyanobacteria, an archaeum, or a eukaryote. The bacteria may be a Bacillus species (sp), Bifidobacterium species (sp), Caldalkalibacillus species (sp), Caldicellulosiruptor species (sp), Cellvibrio species (sp), Clostridium species (sp), Cupriavidus species (sp), Rhodothermus species (sp), Streptomyces species (sp), Vibrio species (sp), Acidothermus species (sp), butyrivibrio species (sp), Cellulomonas species (sp), Dickeya species (sp), Escherichia species (sp), Fibrobacter species (sp), Halalkalibacter species (sp), Martelella species (sp), Novacetimonas species (sp), Paenibacillus species (sp), Pectobacterium species (sp), Ralstonia species (sp), Ruminiclostridium species (sp), Ruminococcus species (sp), Salipaludibacillus species (sp), Thermoanaerobacterium species (sp), Thermobifida species (sp), Thermoclostridium species (sp), Xanthomonas species (sp), Pseudothermotoga species (sp), Citrobacter species (sp). The Bacillus species may be selected from Bacillus subtilis, Bacillus licheniformis, Bacillus amyloliquefaciens, and Bacillus lentus. The archaeum may be a Thermococcus species. The eukaryote may be a Aspergillus species (sp), Hypocrea species (sp), Candida species (sp), Saccharomyces species (sp), Fusarium species (sp), or a Phanerodontia species (sp).

[0011] The transgene(s) used for the purposes of any of the disclosed aspects or embodiments may be codon optimized for expression in Cupriavidus necator.

[0012] For the purposes of the present disclosure, the strain of C. necator may be modified by, for example, adaptive laboratory evolution or genetic modification.

[0013] For the purposes of the present disclosure, the strain of C. necator may be a strain that grows autotrophically at up to 40° C. For example, the strain of C. necator may be the strain deposited at DSM34774. Additionally or alternatively, the strain of C. necator may have a H₂:CO₂ uptake ratio that is lower than the H₂:CO₂ uptake ratio of a wild type or naturally occurring strain of C. necator cultured under corresponding temperatures and conditions. In some embodiments, the strain of C. necator may comprise a full or partial deletion of a gene or locus encoding a membrane-bound hydrogenase, such as hoxKGXZ.

[0014] The strain of C. necator may also be a strain that produces high levels of protein, which has a favorable amino acid profile. For example, the strain of C. necator may produce about 40%, about 50%, about 60%, about 70%, about 80%, about 90%, or about 95% by weight of protein.

[0015] The heterologous digestive enzyme(s) expressed by the disclosed strains of C. necator may be selected from a protease, a carbohydrase, a lipase, a phytase, and any combination thereof. Such heterologous digestive enzymes can be from a bacteria, such as a bacillus species (sp), or a eukaryote, such as a yeast.

[0016] In another aspect, the present disclosure provides methods of preparing a single-cell protein product, comprising:
[0017] (a) culturing a strain of C. necator disclosed herein (e.g., any of the foregoing aspects or embodiments), thereby creating biomass comprising protein and digestive enzyme,
[0018] (b) isolating the C. necator or the biomass, and
[0019] (c) preparing a single-cell protein product from the C. necator or the biomass.

[0020] In another aspect, the present disclosure provides methods of producing a digestive enzyme, comprising culturing a strain of C. necator disclosed herein (e.g., any of the foregoing aspects or embodiments) such that the digestive enzyme is produced. In some embodiments, the methods may further comprise isolating the digestive enzyme or isolating the strain of C. necator.

[0021] Culturing may comprise growing the strain of C. necator in a fermentation tank. The fermentation tank can be a gas fermentation tank.

[0022] Culturing may also comprise growing the strain of C. necator in autotrophic conditions. The autotrophic conditions comprise providing carbon monoxide (CO) or carbon dioxide (CO₂) as a carbon source. Hydrogen gas may also be present.

[0023] Culturing may also comprise growing the strain of C. necator at a temperature above 30° C. and up to 40° C. For example, the temperature of the culture may be 31° C., 32° C., 33° C., 34° C., 35° C., 36° C., 37° C., 38° C., 39° C., or 40° C.

[0024] In another aspect, the present disclosure provides single-cell protein (SCP) compositions, comprising a strain of C. necator disclosed herein (e.g., any of the foregoing aspects or embodiments) or biomass created therefrom.

[0025] The composition may comprise at least about 40%, about 50%, about 60%, about 70%, about 80%, about 90%, or about 95% by weight of protein.

[0026] The composition may comprise at least about 40%, about 50%, about 60%, about 70%, about 80%, about 90%, or about 95% by weight of a digestive enzyme component. The digestive enzyme component may comprise a protease, a carbohydrase, a lipase, a phytase, and any combination thereof.

[0027] The composition can be produced by culturing a strain of C. necator disclosed herein, thereby creating biomass comprising protein and digestive enzyme, and isolating the C. necator or the biomass.

[0028] In another aspect, the present disclosure provides edible products, comprising (a) a strain of C. necator disclosed herein or biomass created therefrom, or (b) an SCP composition disclosed herein.

[0029] The edible product may be an animal feed, such as a fish feed, a livestock or ruminant feed, a swine feed, goat feed, llama feed, turkey feed, a poultry feed, a rodent feed, a dog feed, and a cat feed.

[0030] The edible product may be a human food, such as a yogurt, a smoothie, a bread product, a pasta product, a nutritional bar, a chip or cracker, a plant-based meat substitute, a cheese, a plant-based cheese, a powdered nutritional supplement, a dairy product, a dairy replacement product, a meat product, a bakery product, a confection, a protein bar, a protein powder, a sport and/or energy drink, a protein shake and/or smoothie, noodles, instant noodles, a soup, an instant soup, a microwaveable food, a canned food, a freeze-dried food, a soft drink, a fruit juice drink, a vegetable drink, an infant formula, a toddler formula, a non-dairy milk, a coffee drink, a tea drink, a nutritional beverage, a powdered beverage, a nutritional supplement, a concentrated beverage, an alcoholic beverage, a cake mix, a rice cake, a flour product, chewing gum, gummies, chocolate, caramel, a cookie, chips, pretzels, crackers, biscuits, cakes, pies, a sauce, a processed seasoning, a flavor seasoning, a cooking mix, a curry, a stew, a dressing, an oils/fat, a butter, a margarine, a mayonnaise and other condiments, a lactic acid bacteria drink, an ice cream, a cream processed fish product, a processed livestock product, an agricultural canned product, a jam or marmalade, a pickled product, and a cereal or cereal product.

[0031] In another aspect, the present disclosure provides method of preparing an edible product, comprising mixing (a) a strain of C. necator disclosed herein or biomass created therefrom, or (b) an SCP composition of C. necator disclosed herein with one or more edible ingredients.

[0032] In another aspect, the present disclosure provides topical product, comprising a digestive enzyme produced by a method disclosed herein or from a strain of C. necator disclosed herein. The topical product may be, for example, a lotion, balm, cream, or makeup.

[0033] The foregoing general description and following detailed description are examples and are intended to provide further explanation of the disclosure as claimed. Other objects, advantages, and novel features will be readily apparent to those skilled in the art from the following brief description of the drawings and detailed description of the disclosure.

[0034] It should be appreciated that all combinations of the foregoing concepts and additional concepts discussed in greater detail below are provided as being part of the inventive subject matter disclosed herein and may be employed in any combination to achieve the benefits described herein.

### BRIEF DESCRIPTION OF DRAWINGS

[0035] These and other aspects of the present disclosure, which should be considered in all its novel aspects, will become apparent from the following description, which is given by way of example only, with reference to the accompanying figures, in which:

[0036] FIG. 1 (FIG. 1): Biomass titer (OD600) and reactor temperature throughout the ˜100 day temperature-tolerance evolution of DSM 541 in CSTR. Reactor inputs were kept consistent throughout the experiment, while reactor temperature was gradually increased step-wise.

[0037] FIG. 2 (FIG. 2): Biomass titer (OD600) and reactor temperature of a representative autotrophic CSTR run with DSM 34774. Reactor temperature was held constant at 37° C. demonstrating the ability of the temperature evolved strain to grow on CO₂/H₂/O₂ gas mixtures at elevated temperatures.

[0038] FIG. 3 (FIG. 3): Expression of protease enzymes in Cupriavidus necator. Protease expression in total cell lysate of synthetic constructs with HiBiT tags detected using HiBiT Lytic Detection System. Genes encoding proteases and linked HiBiT tags were expressed via rhamnose inducible promoter with significant expression detection upon addition of 0.1 mM rhamnose.

[0039] FIGS. 4A-4C (FIGS. 4A-4C): show open reading frames (ORFs) in the Δ35433 bp encompassing genes [E6Δ55_33395]-[E6Δ55_33560] of the C. necator genome.

[0040] FIG. 5 (FIG. 5): shows the expression and activity of phytase enzymes in Cupriavidus necator.

[0041] FIG. 6 (FIG. 6): shows the expression of phytase enzymes in Cupriavidus necator.

### DETAILED DESCRIPTION

[0042] The disclosure provides an engineered C. necator bacteria that a heterologous digestive enzyme that is not natively produced by C. necator. The bacteria may be a novel strain of heat-adapted Cupriavidus necator bacteria.

### I. Definitions

[0043] It is to be understood that the disclosed compositions and methods are not limited to the particular implementations described, and as such may vary. It is also to be understood that the terminology used herein is for the purpose of describing particular implementations only, and is not intended to be limiting. The scope of the present technology will be limited only by the appended claims.

[0044] As used herein, certain terms may have the following defined meanings. As used in the specification and claims, the singular form “a,” “an” and “the” include singular and plural references unless the context clearly dictates otherwise. For example, the term “a cell” includes a single cell as well as a plurality of cells, including mixtures thereof.

[0045] As used herein, “about” means the recited quantity exactly and small variations within a limited range encompassing plus or minus 10% of the recited quantity. In other words, the limited range encompassed can include ±10%, ±9%, ±8%, ±7%, ±6%, ±5%, ±4%, ±3%, ±2%, ±1%, ±0.5%, ±0.2%, ±0.1%, ±0.05%, or smaller, as well as the recited value itself. Thus, by way of example, “about 10” should be understood to mean “10” and a range no larger than “9-11”.

[0046] As used herein, the term “bioproduction” is intended to mean production of a compound by way of biological or enzymatic synthesis (as opposed to chemical synthesis). In some implementations, bioproduction may be performed by a transgenic organism or microbe (e.g., C. necator) that has been engineered to express enzymes involved in the biological synthesis of a compound of interest (e.g., a digestive enzymes).

[0047] As used herein, the term “comprising” is intended to mean that the compositions and methods include the recited elements, but not excluding others. “Consisting essentially of” when used to define compositions and methods, shall mean excluding other elements of any essential significance to the composition or method. “Consisting of” shall mean excluding more than trace elements of other ingredients for claimed compositions and substantial method steps. Examples and implementations defined by each of these transition terms are within the scope of this disclosure. Accordingly, it is intended that the methods and compositions can include additional steps and components (comprising) or alternatively including steps and compositions of no significance (consisting essentially of) or alternatively, intending only the stated method steps or compositions (consisting of).

[0048] As used herein, the term “protein” is a biological macromolecule comprised of one or more chain(s) of amino acids. An “enzyme” is a type of protein that possesses a biological catalytic activity that accelerates chemical reaction. Thus, for the purposes of this disclosure, enzymes are an example of a protein that can catalyze a reaction, such as digestion or cleavage of another protein or macromolecule.

[0049] The terms “engineered cell” or “engineered host cell” refer to a modified cell wherein the modification can be selected from e.g., increased expression of a gene, inhibited expression of a gene, knockout of a gene or genes, introduction of a new gene or genes, introduction of mutant gene(s), or mutation/genetic alteration of gene(s), wherein the increased expression or inhibited expression of a gene can be achieved by using techniques, such as gene deletion, changed gene copy number, changed gene promoter (e.g. by using a strong or weak promoter), etc. An engineered cell or engineered host cell may also include a cell that has been isolated. In some implementations, an engineered cell or engineered host cell is a transgenic cell. In some implementations, an engineered cell or engineered host cell is a transgenic cell capable of producing high levels of a compound or biomolecule of interest. An example of a host cell herein may be a C. necator cell.

[0050] The terms “feedstock” when used in the context of the stream flowing into a gas fermentation bioreactor (i.e., gas fermenter) or “gas fermentation feedstock” should be understood to encompass any material (solid, liquid, or gas) or stream that can provide a substrate and/or C1-carbon source to a gas fermenter or bioreactor either directly or after processing of the feedstock.

[0051] The term “waste gas” or “waste gas stream” may be used to refer to any gas stream that is either emitted directly, flared with no additional value capture, or combusted for energy recovery purposes.

[0052] The terms “synthesis gas” or “syngas” refers to a gaseous mixture that contains at least one carbon source, such as carbon monoxide (CO), carbon dioxide (CO₂), or any combination thereof, and, optionally, hydrogen (H₂) that can used as a feedstock for the disclosed gas fermentation processes and can be produced from a wide range of carbonaceous material, both solid and liquid.

[0053] The terms “derived from” or “derivative” indicates that a nucleic acid, protein, or microorganism is modified or adapted from a different (e.g., a parental or wild-type) nucleic acid, protein, or microorganism, so as to produce a new nucleic acid, protein, or microorganism. Such modifications or adaptations typically include insertion, deletion, mutation, or substitution of nucleic acids or genes.

[0054] For the purposes of this disclosure, all of the compounds, enzymes, and cells disclosed herein can be isolated in a form that is substantially free of other proteins, contaminants, macromolecules (e.g., nucleic acids, lipids, etc.), or cells. However, it should be understood that an “isolated” enzyme may not be 100% free of other proteins, contaminants, or macromolecules, and absolute purity is not required in order for a protein or enzyme to be considered “isolated.”

[0055] For the purposes of this disclosure, a “wild type” is the phenotype or sequence of the typical form of a cell, protein, or enzyme as it occurs in nature (i.e., the “normal” or “standard” cell or protein sequence, as opposed to an engineered or otherwise altered variant or a naturally occurring mutant).

[0056] As used herein, “optional” or “optionally” means that the subsequently described event or circumstance may or may not occur, and that the description includes instances where said event or circumstance occurs and instances where it does not.

[0057] The term “metabolic trait” refers to metabolic features of the cell or organisms, e.g. the capability to produce a certain product under certain conditions, the capability to survive and reproduce under certain conditions, such as certain pH, temperature, certain gas levels, or certain nutrients, preferably certain temperatures or certain nutrients.

[0058] As used herein, the term “vector” refers to a nucleic acid molecule that can transport another nucleic acid to which it is attached. One type of vector is a “plasmid,” which stands for a circular double-stranded DNA loop into which additional DNA segments can be ligated.

[0059] Another type of vector is a viral vector, whereby additional DNA segments can be ligated into the viral genome. Certain vectors can replicate autonomously in a host cell into which they have been introduced (e.g., bacterial vectors with a bacterial origin of replication). Other vectors are advantageously integrated into the genome of a host cell when introduced into the host cell and are thereby replicated together with the host genome. In addition, certain vectors can control the expression of genes to which they are operably linked. These vectors are referred to here as “expression vectors.” Usually expression vectors suitable for recombinant DNA techniques are in the form of plasmids. In the present description, “plasmid” and “vector” can be used interchangeably because the plasmid is the most commonly used vector form. However, the disclosure is intended to encompass these other expression vector forms, such as viral vectors, which perform similar functions.

[0060] “Transgene” or “recombinant” as used in the present disclosure, for example with respect to a nucleic acid sequence, an expression cassette, gene construct, or a vector containing the nucleic acid sequence according to the disclosure or an organism transformed with the nucleic acid sequences, expression cassette or vector according to the disclosure, all those obtained by genetic engineering methods Constructions in which either a) the nucleic acid sequence according to the disclosure, or b) a genetic control sequence functionally linked to the nucleic acid sequence according to the disclosure, for example a promoter, or c) (a) and (b) are not in their natural, genetic environment or were modified by genetic engineering methods, the modification being an example.

[0061] A transgenic organism or transgenic bacteria in the sense of the disclosure is to be understood to mean that the nucleic acids used in the method do not bind their natural position in the genome of an organism, the nucleic acids can be expressed homologously or heterologously. However, as mentioned, transgene also means that the nucleic acids according to the disclosure are in their natural place in the genome of an organism, but that the sequence has been changed compared to the natural sequence and/or that the regulatory sequences of the natural sequences have been changed. Transgenic is preferably to be understood as meaning the expression of the nucleic acids according to the disclosure at a non-natural location in the genome, that is to say that the nucleic acids are homologous or preferably heterologous.

[0062] As used herein, the term “autotrophic bacteria” refers to a bacteria that is capable of producing all its biomass carbon from CO₂.

[0063] For the purpose of the description, a phrase in the form “A/B” or in the form “A and/or B” means (A), (B), or (A and B).

### II. C1-Fixing Microorganisms

[0064] As described above, however, the microorganism of the disclosure may also be derived from essentially any parental microorganism, such as a parental microorganism selected from the group consisting of Escherichia coli and Saccharomyces cerevisiae

[0065] In another embodiment, the microorganism of the disclosure is an aerobic bacterium. In one embodiment, the microorganism of the disclosure comprises aerobic hydrogen bacteria. In an embodiment, the aerobic bacteria comprising at least one disrupted gene.

[0066] A number of aerobic bacteria are known to be capable of carrying out fermentation for the disclosed methods and system. Examples of such bacteria that are suitable for use in the disclosure include bacteria of the genus Cupriavidus and Ralstonia. In some embodiments, the aerobic bacteria is Cupriavidus necator or Ralstonia eutropha. In some embodiments, the aerobic bacteria is Cupriavidus alkaliphilus. In some embodiments, the aerobic bacteria is Cupriavidus basilensis. In some embodiments, the aerobic bacteria is Cupriavidus campinensis. In some embodiments, the aerobic bacteria is Cupriavidus gilardii. In some embodiments, the aerobic bacteria is Cupriavidus laharis. In some embodiments, the aerobic bacteria is Cupriavidus metallidurans. In some embodiments, the aerobic bacteria is Cupriavidus nantongensis. In some embodiments, the aerobic bacteria is Cupriavidus numazuensis. In some embodiments, the aerobic bacteria is Cupriavidus oxalaticus. In some embodiments, the aerobic bacteria is Cupriavidus pampae. In some embodiments, the aerobic bacteria is Cupriavidus pauculus. In some embodiments, the aerobic bacteria is Cupriavidus pinatubonensis. In some embodiments, the aerobic bacteria is Cupriavidus plantarum. In some embodiments, the aerobic bacteria is Cupriavidus respiraculi. In some embodiments, the aerobic bacteria is Cupriavidus taiwanensis. In some embodiments, the aerobic bacteria is Cupriavidus yeoncheonensis.

[0067] In some embodiments, the strain is Cupriavidus necator DSM 428, DSM 531, or DSM541, or any derivatives thereof. In another embodiment, the strain is Cupriavidus necator DSM 34774. In some embodiments, the strain comprises SEQ ID NOs: 1-3. In some embodiments, the strain is a derivative of Cupriavidus necator DSM 34774. In another embodiment, the strain is a derivative of SEQ ID NO: 1-3.

[0068] In some embodiments, the aerobic bacteria comprises one or more exogenous nucleic acid molecules encoding a naturally occurring polypeptide, wherein the polypeptide is ribulose bisphosphate carboxylase, acetyl-CoA acetyltransferase, 3-hydroxybutyryl-CoA dehydratase, butyryl-CoA dehydrogenase, butanol dehydrogenase, electron-transferring flavoprotein large subunit, 3-hydroxybutyryl-CoA dehydrogenase, bifunctional acetaldehyde-CoA/alcohol dehydrogenase, acetaldehyde dehydrogenase, aldehyde decarbonylase, acyl-ACP reductase, L-1,2-propanediol oxidoreductase, acyltransferase, 3-oxoacyl-ACP synthase, 3-hydroxybutyryl-CoA epimerase/delta(3)-cis-delta(2)-trans-enoyl-CoA isomerase/enoyl-CoA hydratase/3-hydroxyacyl-CoA dehydrogenase, short chain dehydrogenase, trans-2-enoyl-CoA reductase, or any combination thereof.

[0069] In the microorganisms of the disclosure, carbon flux is strategically diverted away from nonessential or undesirable products and towards products of interest. In certain embodiments, these disrupted genes divert carbon flux away from nonessential or undesirable metabolic nodes and through target metabolic nodes to improve production of products downstream of those target metabolic nodes. In an embodiment, limitation selected from nutrients, dissolved oxygen, or any combination thereof diverts carbon flux to desired products.

[0070] In an embodiment, the fermentation broth comprises the feed streams in combination with the aerobic microorganism in the bioreactor. In some embodiments, the feed streams, e.g., a carbon source feed stream, a flammable gas-containing stream, and an oxygen-containing gas feed stream, react with the microorganism in the bioreactor to at least partially form the fermentation broth (which may also include other products, byproducts, and other media fed to the bioreactor). The unreacted oxygen, or the oxygen that is not consumed by the microorganism, exists as both dissolved oxygen and gaseous oxygen in a dispersed gaseous phase within the fermentation broth. The same holds true for the other gases that are soluble. The dispersed gaseous phase, containing the unreacted components, e.g., oxygen, nitrogen, hydrogen, carbon dioxide and/or water vapor, rises to the headspace of the bioreactor.

[0071] In some embodiments, an oxygen-containing gas, e.g., air, can be fed directly into the fermentation broth. In one embodiment, the oxygen-containing gas can be an oxygen-enriched source, e.g., oxygen-enriched air or pure oxygen. In an embodiment, the oxygen-containing gas may comprise greater than 6.0 vol. % of oxygen, e.g., greater than 10.0 vol. %, greater than 20.0 vol. %, greater than 40.0 vol. %, greater than 60.0 vol. %, greater than 80.0 vol. %, or greater than 90.0 vol. %. In some embodiments, the oxygen-containing gas may be pure oxygen.

[0072] In one embodiment, the microorganism of the disclosure is capable of producing ethylene. One embodiment is directed to a recombinant C1-fixing microorganism capable of producing ethylene from a carbon source comprising a nucleic acid encoding a group of exogenous enzymes comprising at least one ethylene forming enzyme (EFE). In some embodiments the EFE is derived from Pseudomonas syringae. In an embodiment, the EFE has an E.C. number 1.13.12.19. The microorganism of an embodiment comprising at least one EFE having an E.C. number 1.13.12.19. The microorganism of an embodiment, further comprising a nucleic acid encoding a group of exogenous enzymes comprising at least one alpha-ketoglutarate permease (AKGP).

[0073] The microorganism of an embodiment, wherein a nucleic acid encoding a group of exogenous enzymes comprises at least one EFE, at least one AKGP, or any combination thereof. The microorganism of an embodiment, wherein a nucleic acid encoding a group of exogenous enzymes comprises at least one EFE and at least one AKGP. The microorganism of an embodiment, wherein the nucleotide encoding a group of exogenous enzymes is inserted into a bacterial vector plasmid, a high copy number bacterial vector plasmid, a bacterial vector plasmid having an inducible promoter, a nucleotide guide of a homologous recombination system, a CRISPR Cas system, or any combination thereof. In an embodiment, the promoter is a phosphate limited inducible promoter. In some embodiments, the promoter is a nitrogen limited promoter. In some embodiments, the promoter is an NtrC-P activated promoter. In some embodiments, the promoter is a H₂ inducible promoter. In one embodiment, the microorganism comprises an intracellular oxygen concentration limit. In another embodiment, the method limits intracellular oxygen concentration. In one embodiment, the method comprises a step of controlling dissolved oxygen. In an embodiment, the method comprises decreased ethylene production with decreased dissolved oxygen concentration. In some embodiments, the microorganism comprises a molecular switch. In some embodiments, the microorganism comprises an ability to switch the cellular burden under variable conditions.

[0074] In some embodiments, the microorganism is a natural or an engineered microorganism that is capable of converting a gaseous substrate as a carbon and/or energy source. In one embodiment, the gaseous substrate includes CO₂ as a carbon source. In some embodiments, the gaseous substrate includes H₂, and/or O₂ as an energy source. In one embodiment, the gaseous substrate includes a mixture of gases, comprising H₂ and/or CO₂ and/or CO.

[0075] In some embodiments, the gas fermentation product is selected from an alcohol, an acid, a diacid, an alkene, a terpene, an isoprene, and alkyne. In some embodiments, the method and microorganism disclosed herein are for the improved production of ethylene. In an embodiment, the method and microorganism disclosed herein are for the improved production of a gas fermentation product.

[0076] In one embodiment, the aerobic bacteria may produce a product such as acetone, isopropanol, 3-hydroxyisovaleryl-CoA, 3-hydroxyisovalerate, isobutylene, isopentenyl pyrophosphate, dimethylallyl pyrophosphate, isoprene, farnesene, 3-hydroxybutyryl-CoA, crotonyl-CoA, 3-hydroxybutyrate, 3-hydroxybutyrylaldehyde, 1,3-butanediol, 2-hydroxyisobutyryl-CoA, 2-hydroxyisobutyrate, butyryl-CoA, butyrate, butanol, caproate, hexanol, octanoate, octanol, 1,3-hexanediol, 2-buten-1-ol, isovaleryl-CoA, isovalerate, isoamyl alcohol, methacrolein, methyl-methacrylate, or any combination thereof.

[0077] In another embodiment, the bacteria of the disclosure may produce ethylene, ethanol, propane, acetate, 1-butanol, butyrate, 2,3-butanediol, lactate, butene, butadiene, methyl ethyl ketone (2-butanone), acetone, isopropanol, a lipid, 3-hydroxypropionate (3-HP), a terpene, isoprene, a fatty acid, 2-butanol, 1,2-propanediol, 1-propanol, 1-hexanol, 1-octanol, a fatty alcohol, chorismate-derived products, 3-hydroxybutyrate, 1,3-butanediol, 2-hydroxyisobutyrate or 2-hydroxyisobutyric acid, isobutylene, adipic acid, keto-adipic acid, 1,3hexanediol, 3-methyl-2-butanol, 2-buten-1-ol, isovalerate, isoamyl alcohol, and monoethylene glycol, or any combination thereof.

[0078] The disclosure provides microorganisms capable of producing ethylene comprising culturing the microorganism of the disclosure in the presence of a substrate, whereby the microorganism produces ethylene.

[0079] As used herein, the terms “intermediate” and “precursor” can be used interchangeably to refer to a substance, such as a molecule, compound, or protein, that is produced upstream of a particular product. The intermediate may be directly upstream of the product. The intermediate may be indirectly upstream of the product. For example, in the exemplary reaction “compound A”→“compound B”→“compound C”→“compound D”, “compound” C is an intermediate that is directly upstream of the product, “compound D,” and “compound B” is an intermediate that is indirectly upstream of the product, “compound D.”

[0080] The enzymes of the disclosure may be codon optimized for expression in the microorganism of the disclosure. “Codon optimization” refers to the mutation of a nucleic acid, such as a gene, for optimized or improved translation of the nucleic acid in a particular strain or species. Codon optimization may result in faster translation rates or higher translation accuracy. In a preferred embodiment, the genes of the disclosure are codon optimized for expression in the microorganism of the disclosure. Although codon optimization refers to the underlying genetic sequence, codon optimization often results in improved translation and, thus, improved enzyme expression. Accordingly, the enzymes of the disclosure may also be described as being codon optimized.

[0081] One or more of the enzymes of the disclosure may be overexpressed. “Overexpressed” refers to an increase in expression of a nucleic acid or protein in the microorganism of the disclosure compared to the wild-type or parental microorganism from which the microorganism of the disclosure is derived. Overexpression may be achieved by any means known in the art, including modifying gene copy number, gene transcription rate, gene translation rate, or enzyme degradation rate.

[0082] The enzymes of the disclosure may comprise a disruptive mutation. A “disruptive mutation” refers to a mutation that reduces or eliminates (i.e., “disrupts”) the expression or activity of a gene or enzyme. The disruptive mutation may partially inactivate, fully inactivate, or delete the gene or enzyme. The disruptive mutation may be a knockout (KO) mutation. The disruptive mutation may be any mutation that reduces, prevents, or blocks the biosynthesis of a product produced by an enzyme. The disruptive mutation may include, for example, a mutation in a gene encoding an enzyme, a mutation in a genetic regulatory element involved in the expression of a gene encoding an enzyme, the introduction of a nucleic acid which produces a protein that reduces or inhibits the activity of an enzyme, or the introduction of a nucleic acid (e.g., antisense RNA, siRNA, CRISPR) or protein which inhibits the expression of an enzyme. The disruptive mutation may be introduced using any method known in the art.

[0083] The disclosed microorganisms, including C. necator, may utilize various carbon sources, including gaseous carbon sources as a substrate.

[0084] In some embodiments, the substrate comprises CO₂ and an energy source. In some embodiments, the substrate comprises CO₂ and an energy source. In an embodiment, the substrate comprises CO₂, H₂, and O₂. In some embodiments, the substrate comprises CO₂ and any suitable energy source. In one embodiment, the substrate comprises CO. In one embodiment, the substrate comprises CO₂ and CO. In another embodiment, the substrate comprises CO₂ and H₂. In another embodiment, the substrate comprises CO₂ and CO and H₂.

[0085] “Substrate” refers to a carbon and/or energy source for the microorganism of the disclosure. Often, the substrate is gaseous and comprises a C1-carbon source, for example, CO, CO₂, and/or CH₄. Preferably, the substrate comprises a C1-carbon source of CO or CO+CO₂. The substrate may further comprise other non-carbon components, such as H₂, N₂, or electrons. In other embodiments, however, the substrate may be a carbohydrate, such as sugar, starch, fiber, lignin, cellulose, or hemicellulose or a combination thereof. For example, the carbohydrate may be fructose, galactose, glucose, lactose, maltose, sucrose, xylose, or some combination thereof. In some embodiments, the substrate does not comprise (D)-xylose (Alkim, Microb Cell Fact, 14: 127, 2015). In some embodiments, the substrate does not comprise a pentose such as xylose (Pereira, Metab Eng, 34: 80-87, 2016). In some embodiments, the substrate may comprise both gaseous and carbohydrate substrates (mixotrophic fermentation). The substrate may further comprise other non-carbon components, such as H₂, N₂, or electrons.

[0086] In some embodiments, the gaseous substrate generally comprises at least some amount of CO, such as about 1, 2, 5, 10, 20, 30, 40, 50, 60, 70, 80, 90, or 100 mol % CO. The gaseous substrate may comprise a range of CO, such as about 20-80, 30-70, or 40-60 mol % CO. Preferably, the gaseous substrate comprises about 40-70 mol % CO (e.g., steel mill or blast furnace gas), about 20-30 mol % CO (e.g., basic oxygen furnace gas), or about 15-45 mol % CO (e.g., syngas). In some embodiments, the gaseous substrate may comprise a relatively low amount of CO, such as about 1-10 or 1-20 mol % CO. The microorganism of the disclosure typically converts at least a portion of the CO in the gaseous substrate to a product. In some embodiments, the gaseous substrate comprises no or substantially no (<1 mol %) CO.

[0087] The gaseous substrate may comprise some amount of H₂. For example, the gaseous substrate may comprise about 1, 2, 5, 10, 15, 20, or 30 mol % H₂. In some embodiments, the gaseous substrate may comprise a relatively high amount of H₂, such as about 60, 70, 80, or 90 mol % H₂. In further embodiments, the gaseous substrate comprises no or substantially no (<1 mol %) H₂.

[0088] The gaseous substrate may comprise some amount of CO₂. For example, the gaseous substrate may comprise about 1-80 or 1-30 mol % CO₂. In some embodiments, the gaseous substrate may comprise less than about 20, 15, 10, or 5 mol % CO₂. In another embodiment, the gaseous substrate comprises no or substantially no (<1 mol %) CO₂.

[0089] The gaseous substrate may also be provided in alternative forms. For example, the gaseous substrate may be dissolved in a liquid or adsorbed onto a solid support.

[0090] The gaseous substrate and/or C1-carbon source may be a waste gas or an off gas obtained as a byproduct of an industrial process or from some other source, such as from automobile exhaust fumes or biomass gasification. In certain embodiments, the industrial process is selected from the group consisting of ferrous metal products manufacturing, such as a steel mill manufacturing, non-ferrous products manufacturing, petroleum refining, coal gasification, electric power production, carbon black production, ammonia production, methanol production, and coke manufacturing. In these embodiments, the gaseous substrate and/or C1-carbon source may be captured from the industrial process before it is emitted into the atmosphere, using any convenient method.

[0091] The gaseous substrate and/or C1-carbon source may be syngas, such as syngas obtained by gasification of coal or refinery residues, gasification of biomass or lignocellulosic material, or reforming of natural gas. In another embodiment, the syngas may be obtained from the gasification of municipal solid waste or industrial solid waste.

[0092] The substrate and/or C1-carbon source may be a waste gas obtained as a byproduct of an industrial process or from another source, such as automobile exhaust fumes, biogas, landfill gas, direct air capture, or from electrolysis. The substrate and/or C1-carbon source may be syngas generated by pyrolysis, torrefaction, or gasification. In other words, carbon in waste material may be recycled by pyrolysis, torrefaction, or gasification to generate syngas which is used as the substrate and/or C1-carbon source. The substrate and/or C1-carbon source may be a gas comprising methane.

[0093] In certain embodiments, the industrial process is selected from ferrous metal products manufacturing, such as a steel manufacturing, non-ferrous products manufacturing, petroleum refining, electric power production, carbon black production, paper and pulp manufacturing, ammonia production, methanol production, coke manufacturing, petrochemical production, carbohydrate fermentation, cement making, aerobic digestion, anaerobic digestion, catalytic processes, natural gas extraction, cellulosic fermentation, oil extraction, geological reservoirs, gas from fossil resources such as natural gas coal and oil, or any combination thereof.

[0094] Examples of specific processing steps within an industrial process include catalyst regeneration, fluid catalyst cracking, and catalyst regeneration. Air separation and direct air capture are other suitable industrial processes. Specific examples in steel and ferroalloy manufacturing include blast furnace gas, basic oxygen furnace gas, coke oven gas, direct reduction of iron furnace top-gas, and residual gas from smelting iron. In these embodiments, the substrate and/or C1-carbon source may be captured from the industrial process before it is emitted into the atmosphere, using any known method.

[0095] The substrate and/or C1-carbon source may be synthesis gas known as syngas, which may be obtained from reforming, partial oxidation, or gasification processes. Examples of gasification processes include gasification of coal, gasification of refinery residues, gasification of petroleum coke, gasification of biomass, gasification of lignocellulosic material, gasification of waste wood, gasification of black liquor, gasification of municipal solid waste, gasification of municipal liquid waste, gasification of industrial solid waste, gasification of industrial liquid waste, gasification of refuse derived fuel, gasification of sewerage, gasification of sewerage sludge, gasification of sludge from wastewater treatment, gasification of biogas. Examples of reforming processes include, steam methane reforming, steam naphtha reforming, reforming of natural gas, reforming of biogas, reforming of landfill gas, naphtha reforming, and dry methane reforming. Examples of partial oxidation processes include thermal and catalytic partial oxidation processes, catalytic partial oxidation of natural gas, partial oxidation of hydrocarbons. Examples of municipal solid waste include tires, plastics, fibers, such as in shoes, apparel, and textiles. Municipal solid waste may be simply landfill-type waste. The municipal solid waste may be sorted or unsorted. Examples of biomass may include lignocellulosic material and may also include microbial biomass. Lignocellulosic material may include agriculture waste and forest waste.

[0096] The substrate and/or C1-carbon source may be a gas stream comprising methane. Such a methane containing gas may be obtained from fossil methane emission such as during fracking, wastewater treatment, livestock, agriculture, and municipal solid waste landfills. It is also envisioned that the methane may be burned to produce electricity or heat, and the C1 byproducts may be used as the substrate or carbon source.

[0097] The composition of the gaseous substrate may have a significant impact on the efficiency and/or cost of the reaction. For example, the presence of oxygen (O₂) may reduce the efficiency of an anaerobic fermentation process. Depending on the composition of the substrate, it may be desirable to treat, scrub, or filter the substrate to remove any undesired impurities, such as toxins, undesired components, or dust particles, and/or increase the concentration of desirable components.

[0098] Regardless of the source or precise content of the gas used as a feedstock, the feedstock may be metered (e.g., for carbon credit calculations or mass balancing of sustainable carbon with overall products) into a bioreactor in order to maintain control of the follow rate and amount of carbon provided to the culture. Similarly, the output of the bioreactor may be metered (e.g., for carbon credit calculations or mass balancing of sustainable carbon with overall products) or comprise a valved connection that can control the flow of the output and products (e.g., ethylene, ethanol, acetate, 1-butanol, etc.) produced via fermentation. Such a valve or metering mechanism can be useful for a variety of purposes including, but not limited to, slugging of product through a connected pipeline and measuring the amount of output from a given bioreactor such that if the product is mixed with other gases or liquids the resulting mixture can later be mass balanced to determine the percentage of the product that was produced from the bioreactor.

[0099] In certain embodiments, the fermentation is performed in the absence of carbohydrate substrates, such as sugar, starch, fiber, lignin, cellulose, or hemicellulose.

[0100] A microorganism of the present disclosure may classified based on functional characteristics. For example, the microorganism may be or may be derived from a C1-fixing microorganism, an aerobe, a hydrogen-oxidizing bacteria, a hydrogenotroph, an anaerobe, an acetogen, an ethanologen, and/or a carboxydotroph.

III. Cupriavidus necator

[0101] Cupriavidus necator (also referred to as Hydrogenomonas eutrophus, Alcaligenes eutropha, Ralstonia eutropha, and Wautersia eutropha) is a Gram-negative, flagellated soil bacterium of the Betaproteobacteria class. It is a hydrogen-oxidizing bacterium that is capable of growing in both anaerobic and aerobic environments.

[0102] In addition to wild-type and naturally occurring strains of C. necator, the present disclosure also provides non-naturally occurring C. necator strains that are capable of growing in autotrophic conditions at elevated temperatures (i.e., temperature above 30° C.). Such temperature-resistant strains of C. necator are capable of growth even up to 40° C. Naturally occurring strains of C. necator are incapable of growth and survival at temperatures above 30° C. Thus, for the purposes of the present disclosure, the C. necator strain that is engineered to produce digestive enzymes can be a strain that can go in autotrophic conditions between 31-40° C. In other words, the engineered C. nectar of the present disclosure can be prepared from a strain that can grow autotrophically at 31° C., 32° C., 33° C., 34° C., 35° C., 36° C., 37° C., 38° C., 39° C., or at 40° C. The C. nectar may grow at a range of 32-40° C., 33-40° C., 34-40° C., 35-40° C., 31-39° C., 32-39° C., 33-39° C., 34-39° C., or 35-39° C.

[0103] The disclosed temperature resistant strains of C. necator were prepared without genetic modification using Adaptive Laboratory Evolution (ALE), as detailed further in Example 1. Briefly, the bacteria is continuously cultivated under clearly defined conditions for prolonged periods of time. The strain deposited at DSM 34774 possesses the desired phenotype characterized by increased temperature tolerance and surprising growth in autotrophic conditions obtained through ALE. However, such temperature resistant strains could feasibly be prepared through genetic modification as well. SEQ ID NOs: 1-3 provide the genome of an ALE-derived strain of C. necator that is temperature resistant and able to grow in autotrophic conditions at up to 40° C., and those skilled in the art could use this information to prepare further temperature resistant strains via genetic modification of a wild-type strain of C. necator. Such temperature resistant C. necator may be used as a chassis or host cell for the introduction of heterologous genes from other species.

[0104] C. necator strains of present disclosure, including both naturally occurring strains or temperature resistant strains, provide several process advantages for the production of single cell protein for food and feed applications as well as other products. The strains are high in protein content with a favorable amino acid profile, and the disclosed strains can be integrated various processing systems, including processing systems that require increased heat integration schemes and/or limited processing reagents, with relative ease. Further, the C. necator bacteria provided herein may be advantageously capable of culture and growth in elevated temperature conditions that may be required for enzyme function, biosynthesis, or any metabolic process that requires elevated temperatures exceeding the tolerance of naturally occurring C. necator bacteria strains.

[0105] For the purposes of the present disclosure, the C. necator strain utilized for producing digestive enzymes may be a wild-type or naturally occurring stain that is engineered to express one or more digestive enzymes, including, but not limited to, a protease, a carbohydrase, a lipase, a phytase, and any combination thereof. Alternatively, the C. necator strain utilized for producing the digestive enzymes may optionally be a non-naturally occurring strain, such as a heat adapted or temperature resistant strain of C. necator that can grow at temperatures above 30° C. As explained herein, such heat adapted or temperature resistant strains may be obtained by genetic modification or by ALE. Additionally or alternatively, the C. necator strain utilized for producing digestive enzymes may optionally be modified-either via ALE or genetic modification—to minimize the H₂:CO₂ uptake ratio while maximizing intracellular O₂ during autotrophic growth.

[0106] For the purposes of the present disclosure, the C. necator strain utilized for producing digestive enzymes may have a genome comprising or consisting of the nucleic acid sequence of SEQ ID NOs: 1-3 or a genome comprising or consisting of a nucleic acid sequence that is at least 80%, at least 81%, at least 82%, at least 83%, at least 84%, at least 85%, at least 86%, at least 87%, at least 88%, at least 89%, at least 90%, at least 91%, at least 92%, at least 93%, at least 94%, at least 95%, at least 96%, at least 97%, at least 98%, or at least 99% identical to SEQ ID NOs: 1-3. Additionally or alternatively, the C. necator strain utilized for producing digestive enzymes may have a genome comprising or consisting of a nucleic acid sequence that has at least 80%, at least 81%, at least 82%, at least 83%, at least 84%, at least 85%, at least 86%, at least 87%, at least 88%, at least 89%, at least 90%, at least 91%, at least 92%, at least 93%, at least 94%, at least 95%, at least 96%, at least 97%, at least 98%, or at least 99% similarity to SEQ ID NOs: 1-3. The C. necator strain utilized for producing digestive enzymes may also be the strain deposited under accession number DSM 34774, or a strain sharing substantial phenotypic characteristics (e.g., temperature resistance) or genotypic characteristics (e.g., a genome with at least 80% sequence identity to SEQ ID NOs: 1-3 or a genome with at least 80% sequence similarity to SEQ ID NOs: 1-3) with a strain deposited under accession number DSM 34774.

[0107] The C. necator strain having identification reference number DSM 34774 was deposited under the provisions of the Budapest Treaty at the German Collection of Microorganisms (DSM) located at Inhoffenstraße 7B, 38124 Braunschweig, Science Campus Braunschweig-Süd, Germany on Oct. 6, 2023. All restrictions on the availability to the public of the deposited material will be irrevocably removed upon the granting of a patent from the above-identified application. The deposited cultures will be replaced should they die or be destroyed during the enforceable life of any patent issued out of this patent application, for five years after the last request for a sample of the deposited microorganism or for a term of at least thirty (30) years. Samples will be stored under agreements that would make them available beyond the enforceable life of the patent for which the deposit was made.

[0108] Without being bound by theory, specific examples of genetic modifications that may provide temperature resistance in the non-naturally occurring C1-fixing strain C. necator include, but are not limited to, mutations in a hydrogenase regulator (L405H (cTt→cAt) mutation in HoxA encoded by hoxA, E6Δ55_32285), deletions or frame shifts within certain regions (Δ35433 bp encompassing genes [E6Δ55_33395]-[E6Δ55_33560], the open reading frames of which are shown in FIGS. 4A-4C), or mutations in other genes associated with autotrophic growth. Thus, in some embodiments, a temperature resistant strain of C. necator may be genetically modified to possess a temperature resistant phenotype (as opposed to ALE).

[0109] Phenotypic features that the C. necator strain utilized for producing digestive enzymes may possess include, but are not limited to, a growth rate that is at least 20%, at least 25%, at least 30%, at least 35%, at least 40%, at least 45%, at least 50%, at least 55%, as at least 60%, at least 65%, at least 70%, at least 75%, at least 80%, at least 85%, at least 90%, at least 95%, or at least 100% higher than the growth rate of a wild type or naturally occurring strain of C. necator at temperatures above 30° C. For example the growth rate may be at least 20%, at least 25%, at least 30%, at least 35%, at least 40%, at least 45%, at least 50%, at least 55%, as at least 60%, at least 65%, at least 70%, at least 75%, at least 80%, at least 85%, at least 90%, at least 95%, or at least 100% higher than the growth rate of a wild type or naturally occurring strain of C. necator at 31° C., 32° C., 33° C., 34° C., 35° C., 36° C., 37° C., 38° C., 39° C., or 40° C. or within a range of 32-40° C., 33-40° C., 34-40° C., 35-40° C., 31-39° C., 32-39° C., 33-39° C., 34-39° C., or 35-39° C. Optionally, the improved growth at high temperatures may be observed when the C. necator is cultured in autotrophic conditions.

[0110] In some embodiments, the strain is Cupriavidus necator DSM 428, DSM 531, or DSM541, or any derivatives thereof. In another embodiment, the strain is Cupriavidus necator DSM 34774. In some embodiments, the strain comprises SEQ ID NOs: 1-3. In some embodiments, the strain is a derivative of Cupriavidus necator DSM 34774. In another embodiment, the strain is a derivative of SEQ ID NOs: 1-3.

[0111] Additionally or alternatively, the strain of C. necator utilized for the present disclosure may be modified to possess one or more other desirable traits. For example, the strain of C. necator may be modified either via genetic modification or ALE to minimize the H₂:CO₂ uptake ratio while maximizing intracellular O₂ during autotrophic growth. This can be done through the removal or reduction in a membrane-bound hydrogenase system. This can aid in reducing the cost of hydrogen associated with commercial-scale gas fermentation.

[0112] A strain of C. necator can be modified to minimize the H₂:CO₂ uptake ratio by deleting all or a portion of, or otherwise reducing the expression of a membrane-bound hydrogenase system (e.g., the hoxKGZ locus). The hoxKGZ locus encodes a multi-subunit membrane-bound hydrogenase system in Cupriavidus necator, and deleting this locus does not inhibit C. necator autotrophic growth on a gas mixture composed of hydrogen, oxygen, and carbon dioxide. Without being bound by theory, this may result because while the soluble hydrogenase system is required for autotrophic growth, the membrane-bound hydrogenase system wastefully oxidizes hydrogen gas, increasing the culture's H₂:CO₂ uptake ratio without benefiting growth. By deleting or reducing expression of the hoxKGZ locus, growth is not only permitted autotrophically, but the H₂:CO₂ uptake ratio is also reduced while increasing the intracellular O₂ availability to improve O₂-dependent product synthesis.

[0113] Phenotypic features that the C. necator strain utilized for producing digestive enzymes may possess include, but are not limited to, a H₂:CO₂ uptake ratio that is at least 5%, at least 10%, at least 15%, at least 20%, at least 25%, at least 30%, at least 35%, at least 40%, at least 45%, at least 50%, at least 55%, as at least 60%, at least 65%, at least 70%, at least 75%, at least 80%, at least 85%, at least 90%, at least 95%, or at least 100% lower than the H₂:CO₂ uptake ratio of a wild type or naturally occurring strain of C. necator cultured under corresponding temperatures and conditions. For example the H₂:CO₂ uptake ratio may be about 5%, about 10%, about 15%, about 20%, about 25%, about 30%, about 35%, about 40%, about 45%, about 50%, about 55%, as about 60%, about 65%, about 70%, about 75%, about 80%, about 85%, about 90%, about 95%, or about 100% lower than the H₂:CO₂ uptake ratio of a wild type or naturally occurring strain of C. necator cultured under corresponding temperatures and conditions. Optionally, the lower H₂:CO₂ uptake ratio may be observed at elevated culture temperatures, such as 31° C., 32° C., 33° C., 34° C., 35° C., 36° C., 37° C., 38° C., 39° C., or 40° C. or within a range of 32-40° C., 33-40° C., 34-40° C., 35-40° C., 31-39° C., 32-39° C., 33-39° C., 34-39° C., or 35-39° C. Optionally, the improved growth at elevated culture temperatures may be observed when the C. necator is cultured in autotrophic conditions.

[0114] For the purposes of the present disclosure, a strain of C. necator utilized to produce digestive enzymes may possess both temperature resistance and a reduced H₂:CO₂ uptake ratio relative to a wildtype strain of C. necator. For example, the strain deposited under accession number DSM 34774, or a strain sharing substantial phenotypic characteristics (e.g., temperature resistance) or genotypic characteristics (e.g., a genome with at least 80% sequence identity to SEQ ID NOs: 1-3 or a genome with at least 80% sequence similarity to SEQ ID NOs: 1-3) with a strain deposited under accession number DSM 34774 may be further modified by deleting all or a portion of, or otherwise reducing the expression of a membrane-bound hydrogenase system (e.g., the hoxKGZ locus), thus providing a strain of C. necator with both desirable features.

### V. Adaptive Laboratory Evolution (ALE)

[0115] Bacterial strains according to the disclosure can be evolved using adaptive laboratory evolution methods to improve heat tolerance and improve growth and biosynthesis in autotrophic conditions. However, it is understood by those skilled in the art and for the purposes of the present disclosure that ALE is not the only methodology that can be used to prepare a temperature resistant strain of C. necator, but merely one example of a suitable method.

[0116] ALE refers to the culture of cells or organisms under defined conditions leading to adaptive changes that accumulate in populations of cells or (microbial) organisms during selection under specified growth conditions. In particular, the desired trait is selected in an evolution environment where it provides a fitness benefit. In the target environment, the desired trait is exploited (for instance, heat resistance at elevated temperature conditions). In the target environment, the desired trait allows the increase or decrease of at least one desired trait and/or avoids the increase or decrease of at least one trait. In one specific embodiment, in the target environment the desired trait allows the increase in the production flux of a least one desired product or survival advantage.

[0117] Typically, a metabolic trait or a phenotypic trait of interest evolves over several generations of the cell or organism. This may include at least two generations, e.g., at least 10, at least 50, at least 100, at least 200, at least 300 or more generations, preferably at least 50 generations, more preferably about 100 generations or more of the cell or organism are necessary to evolve a metabolic trait. Thus, the cells or organisms are cultured for a certain time in a desired environment for, such as several days, weeks, months or years.

[0118] The target environment should be suitable to evolve a desired trait. When the population of cells or organisms is cultured in the target environment, a part of the population of the cell or organism will establish the desired trait, while some of the cells or organisms will die. In this way, the desired trait is selected. Preferably, at least 5%, at least 10%, at least 20%, at least 30%, at least 40%, at least 50%, at least 60%, at least 70%, at least 80%, at least 90% or more of the population have established the desired metabolic or phenotypic trait.

[0119] For the purposes of the present application, continuous ALE can be used to obtain a heat-resistant strain of C. necator capable of growth and culture at elevated temperatures, optionally in autotrophic conditions. As one example of continuous ALE, Example 1 of this disclosure describes inoculating a continuous-flow stirred tank reactor (CSTR) using a base strain of C. necator (H16 PHB-4). The culture can be continuously grown on a minimal autotrophic media with H₂/O₂/CO₂ inputs. Once the culture is established and growth was maintained at a steady state, the reactor temperature was increased step-wise and held to allow the culture to adapt to the increased temperature. These step wise changes may be continued over the course of several days; for example, 1-3 days, 3-50 days, 50-100 days, 50 days to 1 year, or 1-5 years.

[0120] The pH can be kept between pH 4 and 12, preferably between pH 6 and 9, particularly preferably between pH 7 and 8.

[0121] For the purposes of the present disclosure, ALE can be operated batchwise, semi-batchwise or continuously.

### V. Microbial Cultures

[0122] For the purposes of the present disclosure, C. necator may be grown under any suitable conditions, in an environment that is suitable for growth and production of biomass. For example, the C. necator may be grown in autotrophic culture conditions, heterotrophic culture conditions, or a combination of autotrophic and heterotrophic culture conditions.

[0123] A heterotrophic culture may include a suitable source of carbon and energy, such as one or more sugar (e.g., glucose, fructose, sucrose, etc.). An autotrophic culture may include C1 chemicals such as carbon monoxide, carbon dioxide, methane, methanol, formate, and/or formic acid, and/or mixtures containing C1 chemicals, including, but not limited to, various syngas compositions or various producer gas compositions, e.g., generated from low value sources of carbon and energy, such as, but not limited to, lignocellulosic energy crops, crop residues, bagasse, saw dust, forestry residue, or food, through the gasification, partial oxidation, pyrolysis, or steam reforming of said low value carbon sources, that can be used by an oxyhydrogen microorganism or hydrogen-oxidizing microorganism or carbon monoxide oxidizing microorganism as a carbon source and an energy source.

[0124] The culture systems used to grow C. necator described herein can be housed in culture vessels known and used in the art. In some embodiments, large scale production in a bioreactor vessel can be used to produce large quantities of a desired molecule and/or biomass. The bioreactor may include a fermentation tank for culturing the microorganisms under specific conditions that promote bacterial culture and growth.

[0125] Bioreactor vessels may be used to contain, isolate, and/or protect the culture environment. The culture vessels include those that are known to those of ordinary skill in the art of large scale microbial culturing. Such culture vessels include but are not limited to one or more of the following: airlift reactors; biological scrubber columns; bubble columns; stirred tank reactors; continuous stirred tank reactors; counter-current, upflow, expanded-bed reactors; digesters and in particular digester systems, for example, such known in the art of bioremediation; filters including but not limited to trickling filters, rotating biological contactor filters, rotating discs, soil filters; fluidized bed reactors; gas lift fermenters; immobilized cell reactors; loop reactors; membrane biofilm reactors; pachuca tanks; packed-bed reactors; plug-flow reactors; static mixers; trickle bed reactors; and/or vertical shaft bioreactors.

[0126] Microbial culturing may include the commercial production of biomass and/or organic compounds, e.g., protein product as described herein, specifically single cell protein, cell lysate, protein extract, protein-containing extract, protein concentrate, protein isolate, protein hydrolysate, free amino acids, peptides, oligopeptides, fatty acids or combinations thereof, and/or other nutrients, such as, but not limited to vitamins may be performed in bioreactors at large scale (e.g., 500 L, 1,000 L 5,000 L, 10,000 L, 50,000 L, 100,000 L, 1,000,000 L bioreactor volumes and higher).

[0127] The C. necator may be grown in a liquid media inside a bioreactor using methods described herein. The bioreactor containing the microorganisms may be constructed of opaque materials that keep the culture in near or total darkness. Bioreactors constructed out of opaque materials such as steel and/or other metallic alloys and/or reinforced concrete and/or fiberglass and/or various high strength plastic materials can be designed to have large working volumes. In some aspects, fermenters constructed of steel or other metallic alloys that are 50,000 liters and greater in volume may be utilized. In some aspects, bioreactors capable of containing positive headspace pressures above ambient pressure may be utilized. In some aspects, the bioreactor comprising the microorganism does not allow light to penetrate part or most or all of its contained liquid volume. The C. necator may be cultured without significant or any exposure to light. In certain such embodiments, net CO₂ consumption still occurs in the absence of light due to chemoautotrophic metabolism and conditions.

[0128] In some embodiments, the C. necator are grown and maintained in a medium containing a gaseous carbon source, such as but not limited to syngas, producer gas, or gas mixtures containing H₂ and CO₂, in the absence of light; where such growth is known as chemoautotrophic growth.

[0129] In some aspects, food grade CO₂ and/or air that goes through a direct air capture unit may be utilized by the microorganisms for chemoautotrophic growth. CO₂ may be provided from an industrial source, and optionally may be concentrated via a gas separation procedure, thereby resulting in high concentration food grade CO₂.

[0130] The bioreactor or fermenter may be used to culture cells through the various phases of their physiological cycle. A bioreactor is utilized for the cultivation of cells, which may be maintained at particular phases in their growth curve. The use of bioreactors is advantageous in many ways for cultivating chemoautotrophic growth. For certain embodiments, protein-rich cell mass, which is used to produce proteins or protein hydrolysates, is grown to high densities in liquid suspension. Generally, the control of growth conditions, including control of dissolved carbon dioxide, oxygen, and other gases such as hydrogen, as well as other dissolved nutrients, trace elements, temperature and pH, is facilitated in a bioreactor. For certain embodiments, protein-rich cell mass, which is used to produce amino acids, peptides, proteins, fatty acids, hydrolysates, extracts, or whole cell products, is grown to high densities and/or grown at high productivities, in liquid suspension within a bioreactor.

[0131] Nutrient media, as well as gases, can be added to the bioreactor as either a batch addition, or periodically, or in response to a detected depletion or programmed set point, or continuously over the period the culture is grown and/or maintained. The bioreactor at inoculation may be filled with a starting batch of nutrient media and/or one or more gases at the beginning of growth, and no additional nutrient media and/or one or more gases are added after inoculation. Nutrient media and/or one or more gases may be added periodically after inoculation. For certain embodiments, nutrient media and/or one or more gases are added after inoculation in response to a detected depletion of nutrient and/or gas. Nutrient media and/or one or more gases may be added continuously after inoculation. In some aspects, the added nutrient media does not contain any organic compounds.

[0132] In batch culture systems, the conditions (e.g., nutrient concentration, pH, etc.) under which the microorganism is cultivated generally change continuously throughout the period of growth. To avoid the fluctuating conditions inherent in batch cultures, and to improve the overall productivity of the culture system, the microorganisms that are used for the production of protein and/or other nutrients may be grown in a continuous culture system, such as a chemostat or a continuous-flow stirred tank reactor (CSTR). In such systems, the culture may be maintained in a perpetual exponential phase of growth by feeding it with fresh medium at a constant rate while at the same time maintaining the volume of the culture constant. A continuous culture system ensures that cells are cultivated under environmental conditions that remain roughly constant. Cells may be maintained in a perpetual exponential phase through the use of a chemostat system. In certain cases, the culture may be maintained in a steady state with a roughly fixed amount of standing biomass maintained in the bioreactor over time. The growth rate of a microorganism in continuous culture may be changed by altering the dilution rate. The growth rate of the microorganism may be changed by altering the dilution rate. In aspects, the continuous bioreactor may be maintained as a turbidostat, where a fixed amount of standing biomass is maintained in the bioreactor over time, and where all surplus biomass that is produced beyond that necessary to maintain the fixed amount of standing biomass within the bioreactor, is harvested continuously from the bioreactor.

[0133] Inoculation of the culture into the bioreactor may be performed by methods including, but not limited to, transfer of a C. necator culture from an existing culture inhabiting another bioreactor, or incubation from a seed stock raised in an incubator. The stock of the strain may be transported and stored in forms including but not limited to a powder, liquid, frozen, or freeze-dried form as well as any other suitable form, which may be readily recognized by one skilled in the art. Reserve bacterial cultures may be kept in a metabolically inactive, freeze-dried state until required for restart. When establishing a culture in a very large reactor, cultures may be grown and established in progressively larger intermediate scale vessels prior to inoculation of the full-scale vessel.

[0134] Bioreactors may have mechanisms to enable mixing of the nutrient media that include, but are not limited to, one or more of the following: spinning stir bars, blades, impellers, or turbines; spinning, rocking, or turning vessels; gas lifts, sparging; recirculation of broth from the bottom of the container to the top via a recirculation conduit, flowing the broth through a loop and/or static mixers. The culture media may be mixed continuously or intermittently.

[0135] The microorganism-containing nutrient medium may be removed from the bioreactor partially or completely, periodically or continuously. The microorganism-containing nutrient medium may be replaced periodically with fresh cell-free medium to maintain the cell culture in an exponential growth phase, and/or in another targeted growth phase (e.g. arithmetic growth), and/or to replenish the depleted nutrients in the growth medium, and/or remove inhibitory waste products.

[0136] The ports that are standard in bioreactors may be utilized to deliver, or withdraw, gases, liquids, solids, and/or slurries, into and/or from the bioreactor vessel enclosing the microbes. Many bioreactors have multiple ports for different purposes (e.g., ports for media addition, gas addition, probes for pH and dissolved oxygen, and sampling), and a given port may be used for various purposes during the course of a culture process. As an example, a port might be used to add nutrient media to the bioreactor at one point in time, and at another time might be used for sampling. Preferably, the multiple uses of a sampling port can be performed without introducing contamination or invasive species into the growth environment. A valve or other actuator enabling control of the sample flow or continuous sampling can be provided to a sampling port. The bioreactors may be equipped with at least one port suitable for culture inoculation that can additionally serve other uses including the addition of media or gas. Bioreactor ports enable control of the gas composition and flow rate into the culture environment. For example, the ports can be used as gas inlets into the bioreactor through which gases are pumped.

[0137] Gases that may be pumped into a bioreactor include, but not are not limited to, one or more of the following: syngas, producer gas, hydrogen gas, CO, CO₂, O₂, air, air/CO₂ mixtures, natural gas, methane, ammonia, nitrogen, noble gases, such as argon, as well as other gases. In some embodiments the CO₂ pumped into the system may come from sources including, but not limited to: CO₂ from the gasification of organic matter; CO₂ from the calcination of limestone, CaCO₃, to produce quicklime, CaO; CO₂ from methane steam reforming, such as the CO₂ byproduct from ammonia, methanol, or hydrogen production; CO₂ from combustion, incineration, or flaring; CO₂ byproduct of anaerobic or aerobic fermentation of sugar; CO₂ byproduct of a methanotrophic bioprocess; geologically or geothermally produced or emitted CO₂; CO₂ removed from acid gas or natural gas.

[0138] One or more gases in addition to carbon dioxide, or in place of carbon dioxide as an alternative carbon source, may either be dissolved into solution and fed to the culture broth and/or dissolved directly into the culture broth, including but not limited to gaseous electron donors and/or carbon sources (e.g., hydrogen and/or CO and/or methane gas). Input gases may include other electron donors and/or electron acceptors and/or carbon sources and/or mineral nutrients such as, but not limited to, other gas constituents and impurities of syngas (e.g., hydrocarbons); ammonia; hydrogen sulfide; and/or other sour gases; and/or O₂; and/or mineral containing particulates and ash.

[0139] One or more gases may be dissolved into the culture broth, including but not limited to gaseous electron donors such as, but not limited to, one or more of the following: hydrogen, carbon monoxide, methane, hydrogen sulfide or other sour gases; gaseous carbon sources such as, but not limited to one or more of the following: CO₂, CO, CH₄; and electron acceptors such as, but not limited to, oxygen, either within air (e.g., 20.9% oxygen) or as pure O₂ or as an O₂-enriched gas. The dissolution of these and other gases into solution may be achieved using a system of compressors, flowmeters, and flow valves known to one skilled in the art of fermentation engineering, that feed into one of more of the following widely used systems for dispersing gas into solution: sparging equipment; diffusers including but not limited to dome, tubular, disc, or doughnut geometries; coarse or fine bubble aerators; venturi equipment. Surface aeration and/or gas mass transfer may also be performed using paddle aerators and the like. In certain aspects, gas dissolution may be enhanced by mechanical mixing with an impeller or turbine, as well as hydraulic shear devices to reduce bubble size.

[0140] Following passage through the reactor system holding microorganisms which uptake the gases, in certain embodiments the residual gases may either be recirculated back to the bioreactor, or burned for process heat, or flared, or injected underground, or released into the atmosphere.

[0141] In some aspects, the C. necator may grow on H₂ and CO₂ and other dissolved nutrients under microaerobic conditions. In some aspects, a C1 chemical such as but not limited to carbon monoxide, methane, methanol, formate, or formic acid, and/or mixtures containing C1 chemicals including but not limited to various syngas compositions generated from various gasified, pyrolyzed, or steam-reformed fixed carbon feedstocks, are biochemically converted into longer chain organic chemicals (i.e., C2 or longer and, in some embodiments, C5 or longer carbon chain molecules) under one or more of the following conditions: aerobic, microaerobic, anoxic, anaerobic, and/or facultative conditions.

[0142] A controlled amount of oxygen can also be maintained in the culture broth of some.

[0143] Oxygen may be actively dissolved into solution fed to the culture broth and/or directly dissolved into the culture broth. In some aspects, conditions suitable for growth of an oxyhydrogen microorganism may be deployed, such as use of H₂ and O₂ gas substrates (electron donors and acceptors), and optionally a C1 gaseous carbon source, such as CO₂ and/or CO.

[0144] The C. necator may convert a fuel gas, including but not limited to syngas, producer gas, CO, CO₂, H₂, natural gas, methane, and mixtures thereof. In some embodiments, the heat content of the fuel gas is at least 100 BTU per standard cubic foot (scf). In some embodiments, a bioreactor that is used to contain and grow the microorganisms is equipped with fine-bubble diffusers and/or high-shear impellers for gas delivery.

[0145] Introducing and/or raising the gas flow rate into a bioreactor can enhance mixing of the culture and produce turbulence if the gas inlet is positioned beneath the surface of the liquid media such that gas bubbles or sparges up through the media. Mixing may be enhanced through turbulence provided by gas bubbles and/or sparging and/or gas plugging up through the liquid media. The bioreactor may include gas outlet ports for gas escape and pressure release. Gas inlets and outlets may be equipped with check valves to prevent gas backflow.

[0146] A nutrient media for culture growth and production may be used, including an aqueous solution containing suitable minerals, salts, vitamins, cofactors, buffers, and other components needed for microbial growth, known to those skilled in the art [Bailey and Ollis, Biochemical Engineering Fundamentals, 2nd ed; pp 383-384 and 620-622; McGraw-Hill: New York (1986)].

[0147] Chemicals used for maintenance and growth of microbial cultures as known in the art are included in the nutrient media. These chemicals may include but are not limited to one or more of the following: nitrogen sources such as ammonia, ammonium (e.g., ammonium chloride (NH₄Cl), ammonium sulfate ((NH₄)₂SO₄)), nitrate (e.g., potassium nitrate (KNO₃)), urea or an organic nitrogen source; phosphate (e.g., disodium phosphate (Na₂HPO₄), potassium phosphate (KH₂PO₄), phosphoric acid (H₃PO₄), potassium dithiophosphate (K₃PS₂O₂), potassium orthophosphate (K₃PO₄), dipotassium phosphate (K₂HPO₄)); sulfate; yeast extract; chelated iron; potassium (e.g., potassium phosphate (KH₂PO₄), potassium nitrate (KNO₃), potassium iodide (KI), potassium bromide (KBr)); and other inorganic salts, minerals, and trace nutrients (e.g., sodium chloride (NaCl), magnesium sulfate (MgSO₄7H₂O) or magnesium chloride (MgCl₂), calcium chloride (CaCl₂) or calcium carbonate (CaCO₃), manganese sulfate (MnSO₄7H₂O) or manganese chloride (MnCl₂), ferric chloride (FeCl₃), ferrous sulfate (FeSO₄7H₂O) or ferrous chloride (FeCl₂ 4H₂O), sodium bicarbonate (NaHCO₃) or sodium carbonate (Na₂CO₃), zinc sulfate (ZnSO₄) or zinc chloride (ZnCl₂), ammonium molybdate (NH₄MoO₄) or sodium molybdate (Na₂MoO₄2H₂O), cuprous sulfate (CuSO₄) or copper chloride (CuCl₂ 2H₂O), cobalt chloride (CoCl₂ 6H₂O), aluminum chloride (AlCl₃.6H₂O), lithium chloride (LiCI), boric acid (H₃BO₃), nickel chloride NiCl₂6H₂O), tin chloride (SnCl₂ H₂O), barium chloride (BaCl₂ 2H₂O), copper selenate (CuSeO₄5H₂O) or sodium selenite (Na₂SeO₃), sodium metavanadate (NaVO₃), chromium salts).

[0148] C. necator strains described herein can be cultured in media of any type (rich or minimal), including fermentation medium, and any composition. The selected medium can be supplemented with various additional components. Some non-limiting examples of supplemental components include glucose, fructose, sucrose, starches, polysaccharides, protein hydrolysates, antibiotics, IPTG for gene induction, and ATCC Trace Mineral Supplement. Similarly, other aspects of the medium and growth conditions described herein may be optimized through routine experimentation. For example, pH and temperature are non-limiting examples of factors which can be optimized. In some embodiments, factors such as choice of media, media supplements, and temperature can influence production levels of a desired molecule. In some embodiments, the concentration and amount of a supplemental component may be optimized. In some embodiments, how often the media is supplemented with one or more supplemental components, and the amount of time that the media is cultured before harvesting the desired molecule is optimized.

[0149] The concentrations of nutrient chemicals (e.g., carbon sources, and/or various mineral nutrients), may be maintained within the bioreactor close to or at their respective optimal levels for optimal carbon uptake and/or fixation and/or conversion and/or production of biomass and/or organic compounds, and in particular protein, which may be routinely determined and/or optimized by one of ordinary skill in the art of culturing microorganisms.

[0150] One or more of the following parameters may be monitored and/or controlled in the bioreactor: waste product levels; pH; temperature; salinity; dissolved oxygen; dissolved carbon dioxide gas; liquid flow rates; agitation rate; gas pressure. In certain embodiments, the operating parameters affecting chemoautotrophic growth, and/or other types of growth (e.g., heterotrophic growth) are monitored with sensors (e.g., dissolved oxygen probe or oxidation-reduction probe to gauge electron donor/acceptor concentrations), and/or are controlled either manually or automatically based upon feedback from sensors through the use of equipment including but not limited to actuating valves, pumps, and agitators. The temperature of the incoming broth as well as of incoming gases may be regulated by systems such as, but not limited to, coolers, heaters, and/or heat exchangers.

[0151] The C. necator culture and bioreaction may be maintained using continuous influx and removal of nutrient medium and/or biomass, in steady state where the cell population and environmental parameters (e.g., cell density, pH, DO, chemical concentrations) are targeted at a constant level over time.

[0152] In some aspects, the pH of the microbial culture is controlled. pH may be controlled within an optimal range for microbial maintenance and/or growth and/or conversion of feedstock and/or production of organic compounds and/or survival. To address a decrease in pH, a neutralization step can be performed directly in the bioreactor environment or prior to recycling the media back into the culture vessel through a recirculation loop. Neutralization of acid in the broth of certain embodiments can be accomplished by the addition of bases, including but not limited to one or more of the following: limestone, lime, sodium hydroxide, ammonia, ammonium hydroxide, caustic potash, magnesium oxide, iron oxide, alkaline ash.

[0153] The culture systems may be carried out at varying temperatures controlled by the bioreactor system. The temperature of the culture system may be controlled to optimize enzyme function, protein biosynthesis, or biomass production. Additionally or alternatively, the temperature of the culture system may be dictated by the incorporation of the culture system into an industrial process with a temperature above 30° C. In such situations, the temperature of the culture system may be 31° C., 32° C., 33° C., 34° C., 35° C., 36° C., 37° C., 38° C., 39° C., or 40° C. or within a range of 32-40° C., 33-40° C., 34-40° C., 35-40° C., 31-39° C., 32-39° C., 33-39° C., 34-39° C., or 35-39° C.

VI. Engineered Strains of C. necator For Producing Digestive Enzymes

[0154] While C. necator provides an excellent bacterial strain for numerous applications, in many single cell protein (SCP) applications, such as feed products, digestive enzymes are added to the final product in aid in digestibility. Enzymes that facilitate digestion by breaking down starch, protein, and fat in the digestive system or increasing the availability of nutrients can provide significant nutritional value to feed products. Through the development of engineered C. necator strains that heterologously express stable digestive enzymes, such as proteases, carbohydrases, lipases, and/or phytases, among others, specific single cell protein products can be generated that both enhance the nutritional properties of SCP and aid in unlocking the full nutritional value of any final feed product in which SCP serves as a major constituent. As provided in more detail below, the engineered strains of C. necator provided herein are capable of producing digestive enzymes.

[0155] The engineered C. necator strains of the present disclosure express at least one transgene encoding a heterologous digestive enzymes, wherein the strain of C. necator synthesizes at least one digestive enzyme that is not natively produced by C. necator. The digestive enzyme may be selected from a protease, a carbohydrase, a lipase, a phytase, and any combination thereof. The present disclosure also provides strains of C. necator that expresses a heterologous digestive enzyme encoded by a transgene, wherein the strain of C. necator synthesizes an increased amount of digestive enzyme relative to a strain of C. necator that does not express the heterologous digestive enzyme. Transgenes encoding various digestive enzymes which are advantageously used in the process according to the invention are those which encode polypeptides with protease, carbohydrase, lipase, and/or phytase activity.

[0156] The engineered strains of C. necator are also able to synthesize an increased amount of a digestive enzyme relative to a strain of C. necator that does not express the heterologous digestive enzyme. The digestive enzymes may be a protease, a carbohydrase, a lipase, and/or a phytase.

### A. Digestive Enzymes

[0157] Transgenes encoding various digestive enzymes that may be incorporated into and/or expressed by the engineered strains of C. necator include, but are not limited to, transgenes that encode a protease, a carbohydrase, a lipase, and/or a phytase enzyme. In other words, the heterologous digestive enzymes that are expressed by the engineered strains of C. necator include, but are not limited to, one or more of a protease, a carbohydrase, a lipase, a phytase or any combination thereof.

[0158] The nucleic acid sequences that encode proteins with protease, carbohydrase, lipase, and/or phytase activity can be codon optimized for expression in C. necator regardless of the native species from which they are derived. The nucleic acids can be transfected into the disclosed engineered C. necator alone or in combination, for example, in an expression cassette (i.e., a nucleic acid construct) that the allows expression of the nucleic acids in the C. necator. There can be more than one nucleic acid sequence encoding a protein with a desired enzymatic activity in the nucleic acid construct, such as, for example, a protease, a carbohydrase, a lipase, and/or a phytase may be included. In some embodiments, a protease, a carbohydrase, a lipase, and/or a phytase may be co-expressed.

[0159] The copy number of the heterologous protease, carbohydrase, lipase, and/or phytase genes can be increased, so that the level of protein expression is increased and the yield, production and/or production efficiency of the desired digestive enzymes is also increased.

[0160] The strategy of increasing copy number of the transgene or expression level of the heterologous protein applies analogously to the combination with further digestive enzymes involved in fatty acid, lipid, carbohydrate, or protein metabolism.

[0161] It is, however, to be understood that the engineered strains of C. necator disclosed herein are not limited to expression of protease, carbohydrase, lipase, and/or phytase from Bacillus (Bacillus), Clostridium (Clostridium), Enterococcus (Enterococcus), Geobacillus (Geobacillus), Lactobacillus (Lactobacillus), Lactococcus (Lactococcus), marine Bacillus (Oceanobacillus), Staphylococcus (Staphylococcus), Streptococcus (Streptococcus), or Streptomyces (Streptomyces) protease; or a gram-negative bacterial polypeptide, such as Campylobacter (Campylobacter), Escherichia coli (E. coli), Flavobacterium (Flavobacterium), Clostridium (Fusobacterium), Helicobacter (Helicobacter), Clavibacterium (Ilyobacter), Neisseria (Neisseria), Pseudomonas (Pseudomonas), Salmonella (Salmonella) or Ureabasma (Ureabasma), but rather may express any number or combination of suitable exogenous or heterologous digestive enzymes.

[0162] Heterologous digestive enzymes and the transgenes that express them can be derived from a variety of organisms that natively produce desirable digestive enzymes, such as certain bacteria, cyanobacteria, fungi, algae, and other microbes or animals.

[0163] Thus, heterologous digestive enzymes, as well as nucleic acid sequences encoded the same, can be derived from a bacteria such as a bacteria selected from Bacillus, Clostridium, Enterococcus, Geobacillus, Lactobacillus, Lactococcus, marine Bacillus, Staphylococcus, Streptococcus, Streptomyces Campylobacter, Escherichia coli, Flavobacterium, Helicobacter, Clavibacterium, Neisseria, Pseudomonas, Salmonella or Ureabasma. In some aspects, the digestive enzyme is derived from Bacillus species. In some aspects, Bacillus species includes Bacillus alkalophilus, Bacillus amyloliquefaciens, Bacillus brevis, Bacillus circulans, Bacillus clausii, Bacillus coagulans, Bacillus sp. D-6, Bacillus firmus, Bacillus sp. KSM-KP43, Bacillus lautus, Bacillus lentus, Bacillus licheniformis, Bacillus megaterium, Bacillus pumilus, Bacillus stearothermophilus, Bacillus subtilis, Bacillus thuringiensis.

[0164] Strains of these species are readily available to the public at a number of culture collections, such as the American Type Culture Collection (ATCC), the German Collection of microorganisms and cell cultures (Deutsche Sammlung von Mikroorganismen und Zellkulturen GmbH, DSMZ), the Netherlands collection of species (CBS), and the northern regional research center of the American Collection of agricultural research species (NRRL).

[0165] Thus, heterologous digestive enzymes, as well as nucleic acid sequences encoded the same, can be derived from a fungi such as a fungi selected from Aspergillus awamori, Aspergillus foetidus, Aspergillus fumigatus, Aspergillus japonicus, Aspergillus nidulans, Aspergillus niger, Aspergillus oryzae, Bjerkandera adusta, Ceriporiopsis aneirina, Ceriporiopsis caregiea, Ceriporiopsis gilvescens, Ceriporiopsis pannocinta, Ceriporiopsis rivulosa, Ceriporiopsis subrufa, Ceriporiopsis subvermispora, Chrysosporium inops, Chrysosporium keratinophilum, Chrysosporium lucknowense, Chrysosporium merdarium, Chrysosporium pannicola, Chrysosporium queenslandicum, Chrysosporium tropicum, Chrysosporium zonatum, Coprinus cinereus, Coriolus hirsutus, Fusarium acuminatum, Fusarium bactridioides, Fusarium cerealis, Fusarium crookwellense, Fusarium culmorum, Fusarium graminearum, Fusarium graminum, Fusarium heterosporum, Fusarium negundi, Fusarium oxysporum, Fusarium reticulatum, Fusarium roseum, Fusarium sambucinum, Fusarium sarcochroum, Fusarium sporotrichioides, Fusarium sulphureum, Fusarium torulosum, Fusarium trichothecioides, Fusarium venenatum, Humicola insolens, Humicola lanuginosa, Mucor miehei, Myceliophthora thermophila, Neurospora crassa, Penicillium purpurogenum, Phanerochaete chrysosporium, Phlebia radiata, Pleurotus eryngii, Thermoactinomyces vulgaris, Thielavia terrestris, Trametes villosa, Trametes versicolor, Trichoderma harzianum, Trichoderma koningii, Trichoderma longibrachiatum, Trichoderma reesei, or Trichoderma viride.

### B. Protease Enzymes

[0166] C. necator does not naturally produce significant amounts of digestive enzymes exhibiting protease activity. In the context of a single cell protein product, for example, in the use of animal feed produces, may have a significant beneficial effect on the performance of an animal, including improving one or more of the following: feed conversion ratio (FCR), ability to digest a raw material (e.g. nutrient digestibility, such as amino acid digestibility), nitrogen retention, survival, carcass yield, growth rate, weight gain, feed efficiency animals resistance to necrotic enteritis, immune response of the subject, the growth of beneficial bacteria in the gastrointestinal tract of a subject.

[0167] Accordingly, the present disclosure provides for the introduction of nucleic acids encoding various proteases. Thus, the engineered C. necator of the present disclosure may be modified to express one or more protease enzymes, including, but not limited to, serine proteases trypsin, chymotrypsin, subtilisin, carboxypeptidase, elastase, nuclease, collagenase, dipeptidase, pepsin, rennin, thrombin, plasmin, renin, hyaluronidase, insulinase, chymase, tryptase, cathepsin, and neurolysin.

[0168] Suitable exogenous or heterologous nucleic acid sequences that encode a protein with serine protease activity include, but are not limited to, a nucleic acid sequences that code for proteins or polypeptides having serine protease activity with at least 50% identity or similarity (e.g., at least 60%, at least 70%, at least 80%, at least 90%, at least 95%, at least 96%, at least 97%, at least 98%, or at least 99%) at the amino acid level with the following sequences:

[0169] Bacillus amyloliquefaciens BPN:

Bacillus amyloliquefaciens BPN:
[sequence omitted]
Bacillus alcalophilus Maxacal Mutant
AQSVPWGISRVQAPAAHNRGLTGSGVKVAVLDTGISTHPDLNIRGGASFVPGEPSTQ
DGNGHGTHVAGTIAALNNSIGVLGVAPNAELYAVKVLGASGSGSVSSIAQGLEWAG
NNGMHVANLSLGMAGPSATLEQAVNSATSRGVLVVAASGNSGAGSISYPARYANA
MAVGATDQNNNRASFSQYGAGLDIVAPGVNVQSTYPGSTYASLNGTSMATPHVAG
AAALVKQKNPSWSNVQIRNHLKNTATSLGSTNLYGSGLVNAEAATRGGGSWSHPQ
FEKGGGSGGGSGGSAWSHPQFEK
Bacillus sp. D-6 E1:
NDVARGIVKADVAQNNYGLYGQGQVVAVADTGLDTGRNDSSMHEAFRGKITALY
ALGRTNNANDPNGHGTHVAGSVLGNALNKGMAPQANLVFQSIMDSSGGLGGLPSN
LNTLFSQAWNAGARIHTNSWGAPVNGAYTANSRQVDEYVRNNDMTVLFAAGNEG
PNSGTISAPGTAKNAITVGATENYRPSFGSIADNPNHIAQFSSRGATRDGRIKPDVTAP
GTFILSARSSLAPDSSFWANYNSKYAYMGGTSMATPIVAGNVAQLREHFIKNRGITP
KPSLIKAALIAGATDVGLGYPSGDQGWGRVTLDKSLNVAYVNEATALTTGQKATYS
FQTQAGKPLKISLVWTDAPGSTTASYTLVNDLDLVITAPNGQKYVGNDFSYPYDNN
WDGRNNVENVFINAPQSGTYTIEVQAYNVPSGPQRFSLAIVHGGGSWSHPQFEKGG
GSGGGSGGSAWSHPQFEK
Bacillus lentus Savinase:
AQSVPWGISRVQAPAAHNRGLTGSGVKVAVLDTGISTHPDLNIRGGASFVPGEPSTQ
DGNGHGTHVAGTIAALNNSIGVLGVAPSAELYAVKVLGASGSGSVSSIAQGLEWAG
NNGMHVANLSLGSPSPSATLEQAVNSATSRGVLVVAASGNSGAGSISYPARYANAM
AVGATDQNNNRASFSQYGAGLDIVAPGVNVQSTYPGSTYASLNGTSMATPHVAGA
AALVKQKNPSWSNVQIRNHLKNTATSLGSTNLYGSGLVNAEAATR
Bacillus sp. KSM-KP43 KP-43:
NDVARGIVKADVAQSSYGLYGQGQIVAVADTGLDTGRNDSSMHEAFRGKITALYAL
GRTNNANDTNGHGTHVAGSVLGNGSTNKGMAPQANLVFQSIMDSGGGLGGLPSNL
QTLFSQAYSAGARIHTNSWGAAVNGAYTTDSRNVDDYVRKNDMTILFAAGNEGPN
GGTISAPGTAKNAITVGATENLRPSFGSYADNINHVAQFSSRGPTKDGRIKPDVMAPG
TFILSARSSLAPDSSFWANHDSKYAYMGGTSMATPIVAGNVAQLREHFVKNRGITPK
PSLLKAALIAGAADIGLGYPNGNQGWGRVTLDKSLNVAYVNESSSLSTSQKATYSFT
ATAGKPLKISLVWSDAPASTTASVTLVNDLDLVITAPNGTQYVGNDFTSPYNDNWD
GRNNVENVFINAPQSGTYTIEVQAYNVPVGPQTFSLAIVNGGGSWSHPQFEKGGGSG
GGSGGSAWSHPQFEK
Bacillus lichenformis Alcalase:
AQTVPYGIPLIKADKVQAQGFKGANVKVAVLDTGIQASHPDLNVVGGASFVAGEAY
NTDGNGHGTHVAGTVAALDNTTGVLGVAPSVSLYAVKVLNSSGSGSYSGIVSGIEW
ATTNGMDVINMSLGGASGSTAMKQAVDNAYAKGVVVVAAAGNSGSSGNTNTIGY
PAKYDSVIAVGAVDSNSNRASFSSVGAELEVMAPGAGVYSTYPTNTYATLNGTSMA
SPHVAGAAALILSKHPNLSASQVRNRLSSTATYLGSSFYYGKGLINVEAAAQ
Bacillus subtilis 168 subtilisin 168:
AGKSSTEKKYIVGFKQTMSAMSSAKKKDVISEKGGKVQKQFKYVNAAAATLDEKA
VKELKKDPSVAYVEEDHIAHEYAQSVPYGISQIKAPALHSQGYTGSNVKVAVIDSGI
DSSHPDLNVRGGASFVPSETNPYQDGSSHGTHVAGTIAALNNSIGVLGVAPSASLYA
VKVLDSTGSGQYSWIINGIEWAISNNMDVINMSLGGPTGSTALKTVVDKAVSSGIVV
AAAAGNEGSSGSTSTVGYPAKYPSTIAVGAVNSSNQRASFSSAGSELDVMAPGVSIQ
STLPGGTYGAYNGTSMATPHVAGAAALILSKHPTWTNAQVRDRLESTATYLGNSFY
YGKGLINVQAAAQ
Bacillus subtilis subtilisn:
AGKSNGEKKYIVGFKQTMSTMSAAKKKDVISEKGGKVQKQFKYVDAASATLNEKA
VKELKKDPSVAYVEEDHVAQAYAQSVPYGVSQIKAPALHSQGFTGSNVKVAVIDSG
IDSSHPDLKVAGGASMVPSETNPFQDNNSHGTHVAGTVAALNNSVFVLGVAPSASL
YAVKVLGADGSGQYSWIINGIEWAIANNMDVINMSLGGPSGSAALKAAVDKAVAS
GVVVVAAAGNEGTSGGSSTVGYPGKYPSVIAVGAVNSSNQRASFSSVGSELDVMAP
GVSIQSTLPGNKYGAYNGTSMASPHVAGAAALILFKHPNWTNTQVRSSLENTTTKL
GDAFYYGKGLINVQAAAH
Aspergillus clavatus AlpES1 A. clavatus:
APAREPHPSSNIIPGKYIITFKSGIDTAAIESHTAWASNIHKRNLERRGLVGGEFPAGIE
RKFKIKDFAAYAGSFDPATIEEIRNSEDVAHVEEDQIWYLDALTTQSGAPWGLGSISH
KGQASTNYVYDTSAGAGTYAYVVDSGINVDHIEFQGRATKAYNAVGGDHVDTLGH
GTHVAGTIGGKTYGVAKQTNLLSVKVFEGRTGSTSVILDGENWAANDIVSKGRKGK
AAINMSLGGGYSYAFNNAVESAYEQGVLSVVAAGNEGVDASNSSPASAPNALTVG
ATNKSNARASFSNYGKVLDIFAPGQDILSAWIGSTTATNTISGTSMATPHVVGLAVY
LMGLEGVSGPAAVTQRILQLATSGVISDVKGSPNKLAYNGAA
Streptomyces S8 protease:
AQPEGRVLHAQAAEAVPGSYIVTLKPTSGFKASATEGKQLIAGYGGRITRTYTSALN
GYAAALSSAEARRLAADPAVESVEQDQKVHATATQTNAPWGLDRIDQANLPLNGT
YTYPDSAGGGTTVYVLDTGVRITHQQISGRASYGYDFVDNDAVAQDGAGHGTHVA
TTVAGSTYGVAKKAKIVAVRVLDNNGSGTTAGVIAGVDWITANHVASSVANVSLG
GGPSTALDDAVRRSIASGVTYSIAAGNSGAPASGYSPARVDTAITVGATTRTDARAS
YSNYGPVVDIFAPGSDITAGWNTSDTATYTGSGTSFAAPHVAGAAAVYLTNHPGSSP
AAVASALVNGATSNVLTGIGTGSPNKLLKLVP
Cupriavidus necator H16 serine protease:
APLPDSNRAAPGTEAARSARLVDRDGDRISDDLQARIAAARPGDLVRVVVTFSGPGT
AATARQAVGAFTLDREFRIIRGFSATMTTAQIRALAQQPGVRRIEEDFTVSTKLNAAR
ADFGTDATRTSFGVDGAGIKGCIVDTGVDSNHEQLDARPIPFFDAINGRTSAYDDHG
HGTHVASIAFGDGTGGSGAATYKGVAPGAAIYAAKVLDQSGSGLESQVIAGIDWCV
SQGVRIISMSLGSSAPSDGQDSLSQAVDAAVSSGAVVVVAAGNSGDEPGTVGSPGAA
AQAITVAACAEWSAPAGAPNHSDGIYVTPFSSRGPTLDNRVKPDICAPGLTITAAKA
GTVSGYVTYSGTSMATPFVSGIVALALQANPILSPADLRQKLEVTAQDRGPAGKDND
IGAGLLDGYALVASAKGGTSYQPTVFPTYRRVTGSVANHGQWSYTFSIAQADLGVPI
GATVTINGQAKCILPLLGGCFAAQWDPDLDARLLDPNGVVLSESLCMAGVECGGIG
RQETLHALPTVAGTYTIQVSPSEDSVNLGKGGSFALDLSSGPRAGIASLPVVHVGGLS
ASSTGNKTGWTTTVTVTVHDASHNPVPNATVSGTWSGGYSGSSACTTGAGGQCMV
TSGTISKRKNSVTFAVTNITGTLTYQASSNDMTSVTATKP
Thermoactinomyces vulgaris thermitase:
YTPNDPYFSSRQYGPQKIQAPQAWDIAEGSGAKIAIVDTGVQSNHPDLAGKVVGGW
DFVDNDSTPQNGNGHGTHCAGIAAAVTNNSTGIAGTAPKASILAVRVLDNSGSGTW
TAVANGITYAADQGAKVISLSLGGTVGNSGLQQAVNYAWNKGSVVVAAAGNAGN
TAPNYPAYYSNAIAVASTDQNDNKSSFSTYGSVVDVAAPGSWIYSTYPTSTYASLSG
TSMATPHVAGVAGLLASQGRSASNIRAAIENTADKISGTGTYWAKGRVNAYKAVQ
Y
Bacillus subtilis DY Subtilisin DY BSSDY:
AQTVPYGIPLIKADKVQAQGYKGANVKVGIIDTGIAASHTDLKVVGGASFVSGESYN
TDGNGHGTHVAGTVAALDNTTGVLGVAPNVSLYAIKVLNSSGSGTYSAIVSGIEWA
TQNGLDVINMSLGGPSGSTALKQAVDKAYASGIVVVAAAGNSGSSGSQNTIGYPAK
YDSVIAVGAVDSNKNRASFSSVGAELEVMAPGVSVYSTYPSNTYTSLNGTSMASPH
VAGAAALILSKYPTLSASQVRNRLSSTATNLGDSFYYGKGLINVEAAAQ
Fusarium acuminatum (CBS 124084) serine protease:
ALTTQSGAPWGLGAISHKSSGSTSYIYDTTAGSGSYGYVVDSGINIAHTDFGGRATLG
YNAAGGAHTDTLGHGTHVAGTIGGTKYGVSKKANLISVKVFAGNQAATSVILDGEN
WAVNDITSKGRAGKSVINMSLGGPSSATWTTAINAGYNAGVLSVVAAGNGDVNGN
PLPVSSQSPANAPNALTVAAIDSNWRTASFTNYGAGVDIFGPGVNILSAWIGSSTATN
TISGTSMASPHLAGLALYLQVLEGLSTPAAVTNRIKALGTSGKVTGSLSGSPNLVAY
NGNG

[0170] Suitable exogenous or heterologous nucleic acid sequences encoding a protein with serine protease activity may also include nucleic acid sequences which can be derived as a result of the degenerate genetic code from the amino acid sequences identified above as well as functional equivalents with serine protease activity.

[0171] Suitable exogenous or heterologous nucleic acid sequences that that encode a protein with trypsin activity, chymotrypsin activity, carboxypeptidase activity, elastase activity, nuclease activity, collagenase activity, dipeptidase activity, pepsin activity, dipeptidase activity, rennin activity, thrombin activity, plasmin activity, hyaluronidase activity, insulinase activity, chymase activity, tryptase activity, cathepsin activity, or neurolysin activity.

[0172] For the purposes of the present disclosure, heterologous proteases and the transgenes that express them can be derived from a variety of organisms that natively express such enzymes, such as certain bacteria, cyanobacteria, fungi, algae, and other microbes or animals. Thus, heterologous proteases, as well as nucleic acid sequences encoding the same, can be derived from Bacillus species (e.g., Bacillus amyloliquefaciens or Bacillus lentus), Aspergillus species, Streptomyces species, Cupriavidus species, Thermoactinomyces species, and Fusarium species.

[0173] In certain aspects, the C. necator may be engineered to express one or more functional fragments of a protease enzyme. The phrase “functional fragment” as used herein refers to a polypeptide fragment of a protein that has at least 25%, e.g., at least 30%, at least 40%, at least 50%, at least 60%, at least 70%, at least 75%, at least 80%, at least 85%, at least 90%, at least 95%, at least 98%, at least 99%, or at least 100% of the activity of the corresponding mature, full-length polypeptide. The functional fragment can generally, but not always, be comprised of a continuous region of the protein, wherein the region has functioning protease activity.

[0174] An engineered strain of C. necator can express a protease alone or in combination with one or more of digestive enzyme, including but not limited to, other protease enzymes, a carbohydrase, a lipase, and/or a phytase.

### C. Carbohydrase Enzymes

[0175] C. necator does not naturally produce significant amounts of digestive enzymes exhibiting carbohydrase activity. Accordingly, the present disclosure provides for the introduction of nucleic acids encoding various carbohydrases. Thus, the engineered C. necator of the present disclosure may be modified to express one or more carbohydrase enzymes, including, but not limited to, glucosidases, glucanases, xylanases, galactosidases, fructofuranosidases, mannosidases, thioglucosidases, amylases, maltases, lactases, sucrases, cellulases, hexosanases, pentosanases, fructosyltransferases, chitinases, and/or pectinases. By improving long chain carbohydrase enzyme synthesis in C. necator relative to a wild type strain, the resulting engineered bacterium is capable of producing higher levels various carbohydrase that may aid in digestion and metabolism. Accordingly, various carbohydrase enzymes may be used in combination with the above-disclosed proteases to provide a further engineered biosynthesis of digestive enzymes.

[0176] Carbohydrase enzymes that may be expressed in the engineered C. necator of the present disclosure include, but are not limited to, glucosidases, glucanases, xylanases, galactosidases, fructofuranosidases, mannosidases, thioglucosidases, amylases, maltases, lactases, sucrases, cellulases, hexosanases, pentosanases, fructosyltransferases, chitinases, and pectinases.

[0177] Suitable exogenous or heterologous nucleic acid sequences that that encode a protein with mannanase activity include, but are not limited to, a nucleic acid sequences that code for proteins or polypeptides having mannanase activity with at least 50% identity or similarity (e.g., at least 60%, at least 70%, at least 80%, at least 90%, at least 95%, at least 96%, at least 97%, at least 98%, or at least 99%) at the amino acid level with the following sequences:

[0178] Mannan endo-1,4-beta-mannosidase (EC 3.2.1.78) (1,4-beta-D-mannan mannanohydrolase) (Beta-mannanase) (Glucomannan utilization protein G) Bacillus subtilis (strain 168)

MFKKHTISLLIIFLLASAVLAKPIEAHTVSPVNPNAQQTTKTVMNWLAHLPNRTENR
VLSGAFGGYSHDTFSMAEADRIRSATGQSPAIYGCDYARGWLETANIEDSIDVSCNG
DLMSYWKNGGIPQISLHLANPAFQSGHFKTPITNDQYKKILDSSTVEGKRLNAMLSKI
ADGLQELENQGVPVLFRPLHEMNGEWFWWGLTSYNQKDNERISLYKQLYKKIYHY
MTDTRGLDHLIWVYSPDANRDFKTDFYPGASYVDIVGLDAYFQDAYSINGYDQLTA
LNKPFAFTEVGPQTANGSFDYSLFINAIKQKYPKTIYFLAWNDEWSAAVNKGASALY
HDSWTLNKGEIWNGDSLTPIVE

[0179] Mannan endo-1,4-beta-mannosidase (EC 3.2.1.78) (Beta-mannanase) (Mannanase 26A) (Man26A) (Mannanase A) (ManA) Bifidobacterium adolescentis (strain ATCC 15703/DSM 20083/NCTC 11814/E194a)

MKTTVTKLLATVAAASTIFGMSTLPAFAAEGKSASNGNSVNISDVNATAETRALFDK
LKNSGKGDLRFGQQHATDENISSSASQGDVYETTGKYPAVFGWDAGLALRGAEKPG
SGADKNANAKALAQNITDADSKGAIVTLSAHWCNPGTGKDENDTTAVASELLPGGK
YSGTFNKELDAIAATAQRAKRSDGTLIPIIFRPLHENNGSWFWWGATHASASEYKEL
YRYIVDYLRDVKDVHNLLYAYSPGGVENGDSTDYLATYPGDQWVDVLGYDEYDSD
DSADDSSAWINTVVKDMKMVSDQASQRGKIVALTEFGRSGDRKFKESGTGDKDTK
FFSELAEALAENVPSTAYMMTWANFGGGGDNFQAYTSWKGSDGEADFKAFADSNK
NLMASKDNVDYSNAPAAAMQNGSARIVTPVDGNRVTDTKVVVRVKTEGVKYSDL
DLNSAIVTTDRGQNVKLKYSCNGYFTGILDLNAAGINLDQSKLTLTPQVKTKDGKTL
AAADGNGSVTVKLGAKPEQTVDNVEDFDSYDNEAELQSVYSPSHSTKSNLTLVDSP
EDNGTKAGNIHYDFVSYPEYNGFQRSHTPKQDWSGFSKLNMFLKADGSDHKFVVQ
VNAGGVTFEAYPKIDGTDGHVVSLNFGDADGNGGDFAPASWDTAHAGMKLSQKLL
SKVGSFALYINDNGGNRPKSGDLTLDSIKLDGKRDAYAPNTNPTPGNTAKAQSVDDF
SGYSDDAAAQSAWGNRGHTEVLSLDEGPTDGSKALRFKYDFSNGGWYDVAKYLD
GANWSGESVLAFQVKGDGSGNAIGLQIGTSDGKYFLASVKLDFTGWKQIEIPLVDNA
NLTQSWPEDANKDNPMTEDDLASIKELVFASQQWNSESDGLDSSIADIKVEPAENTS
NEQTPKDESKTEVKADKEQEQSEDTSADVTAQDPATCPISDEDSKGSTGNTTVTVKP
TPDTKEPADNTGKDGLSRTGSNIISAIAAVAVLLLGGCAVLIARKRKGGDIE

[0180] Mannan endo-1,4-beta-mannosidase A and B (EC 3.2.1.78) (1,4-beta-D-mannan mannanohydrolase) (Beta-mannanase) (Endo-1,4-mannanase) [Cleaved into: Mannan endo-1,4-beta-mannosidase A; Mannan endo-1,4-beta-mannosidase B] Caldalkalibacillus mannanilyticus (strain DSM 16130/CIP 109019/JCM 10596/AM-001) (Bacillus mannanilyticus)

MKVYKKVAFVMAFIMFFSVLPTISMSSEANGAALSNPNANQTTKNVYSWLANLPNK
SNKRVVSGHFGGYSDSTLAWIKQCARELTGKMPGILSCDYKNWQTRLYVADQISYG
CNQELINFWNQGGLVTISVHMPNPGFHSGENYKTILPTSQFQNLTNHRTTEGRRWKD
MLDKMADGLDELQNNGVTVLFRPLHEMNGEWFWWGAEGYNQFDQTRANAYISA
WRDMYQYFTHERKLNNLIWVYSPDVYRDHVTSYYPGANYVDIVALDSYHPDPHSL
TDQYNRMIALDKPFAFAEIGPPESMAGSFDYSNYIQAIKQKYPRTVYFLAWNDKWSP
HNNRGAWDLFNDSWVVNRGEIDYGQSNPATVLYDFENNTLSWSGCEFTDGGPWTS
NEWSANGTQSLKADVVLGNNSYHLQKTVNRNLSSFKNLEIKVSHSSWGNVGSGMT
ARVFVKTGSAWRWNAGEFCQFAGKRTTALSIDLTKVSNLHDVREIGVEYKAPANSN
GKTAIYLDHVTVR

[0181] Beta-mannanase/endoglucanase A [Includes: Mannan endo-1,4-beta-mannosidase A (EC 3.2.1.78) (Beta-mannanase) (Endo-1,4-mannanase); Endo-1,4-beta-glucanase (EC 3.2.1.4) (Cellulase)] Caldicellulosiruptor saccharolyticus (Caldocellum saccharolyticum)

MRLKTKIRKKWLSVLCTVVFLLNILFIANVTILPKVGAATSNDGVVKIDTSTLIGTNH
AHCWYRDRLDTALRGIRSWGMNSVRVVLSNGYRWTKIPASEVANIISLSRSLGFKAII
LEVHDTTGYGEDGAACSLAQAVEYWKEIKSVLDGNEDFVIINIGNEPYGNNNYQNW
VNDTKNAIKALRDAGFKHTIMVDAPNWGQDWSNTMRDNAQSIMEADPLRNLVFSI
HMYGVYNTASKVEEYIKSFVDKGLPLVIGEFGHQHTDGDPDEEAIVRYAKQYKIGLF
SWSWCGNSSYVGYLDMVNNWDPNNPTPWGQWYKTNAIGTSSTPTPTSTVTPTPTPT
PTPTPTVTATPTPTPTPVSTPATSGQIKVLYANKETNSTTNTIRPWLKVVNSGSSSIDLS
RVTIRYWYTVDGERAQSAISDWAQIGASNVTFKFVKLSSSVSGADYYLEIGFKSGAG
QLQPGKDTGEIQMRFNKDDWSNYNQGNDWSWIQSMTSYGENEKVTAYIDGVLVW
GQEPSGATPAPAPTATPTPTPTVTPTPTVTPTPTVTATPTPTPTPTPTPVSTPATGGQIK
VLYANKETNSTTNTIRPWLKVVNSGSSSIDLSRVTIRYWYTVDGERAQSAISDWAQI
GASNVTFKFVKLSSSVSGADYYLEIGFKSGAGQLQPGKDTGEIQIRFNKSDWSNYNQ
GNDWSWIQSMTSYGENEKVTAYIDGVLVWGQEPSGTTPSPTSTPTVTVTPTPTPTPTP
TPTPTVTPTPTVTPTPTVTATPTPTPTPIPTVTPLPTISPSPSVVEITINTNAGRTQISPYIY
GANQDIEGVVHSARRLGGNRLTGYNWENNFSNAGNDWYHSSDDYLCWSMGISGE
DAKVPAAVVSKFHEYSLKNNAYSAVTLQMAGYVSKDNYGTVSENETAPSNRWAEV
KFKKDAPLSLNPDLNDNFVYMDEFINYLINKYGMASSPTGIKGYILDNEPDLWASTH
PRIHPNKVTCKELIEKSVELAKVIKTLDPSAEVEGYASYGFMGYYSLQDAPDWNQVK
GEHRWFISWYLEQMKKASDSFGKRLLDVLDLHWYPEARGGNIRVCFDGENDTSKE
VVIARMQAPRTLWDPTYKTSVKGQITAGENSWINQWFSDYLPIIPNVKADIEKYYPG
TKLAISEFDYGGRNHISGGIALADVLGIFGKYGVNFAARWGDSGSYAAAAYNIYLNY
DGKGSKYGNTNVSANTSDVENMPVYASINGQDDSELHIILINRNYDQKLQVKINITST
PKYTKAEIYGFDSNSPEYKKMGNIDNIESNVFTLEVPKFNGVSHSITLDFNVSIKIIQNE
VIKFIRNLVFMRALV

[0182] Mannan endo-1,4-beta-mannosidase (EC 3.2.1.78) (Mannanase 26A) (Man26A) (Mannanase A) (ManA) Cellvibrio japonicus (strain Ueda107) (Pseudomonas fluorescens subsp. cellulosa)

MKTITTARLPWAAQSFALGICLIALLGCNHAANKSSASRADVKPVTVKLVDSQATM
ETRSLFAFMQEQRRHSIMFGHQHETTQGLTITRTDGTQSDTFNAVGDFAAVYGWDT
LSIVAPKAEGDIVAQVKKAYARGGIITVSSHFDNPKTDTQKGVWPVGTSWDQTPAV
VDSLPGGAYNPVLNGYLDQVAEWANNLKDEQGRLIPVIFRLYHENTGSWFWWGDK
QSTPEQYKQLFRYSVEYLRDVKGVRNFLYAYSPNNFWDVTEANYLERYPGDEWVD
VLGFDTYGPVADNADWFRNVVANAALVARMAEARGKIPVISEIGIRAPDIEAGLYD
NQWYRKLISGLKADPDAREIAFLLVWRNAPQGVPGPNGTQVPHYWVPANRPENINN
GTLEDFQAFYADEFTAFNRDIEQVYQRPTLIVK

[0183] Mannan endo-1,4-beta-mannosidase (EC 3.2.1.78) Clostridium acetobutylicum (strain ATCC 824/DSM 792/JCM 1419/LMG 5710/VKM B-1787)

MTLKNPKKLFLSIFAVLYIISAANPTKVSAFFSTCKAGVFLGWDRNIDTSIAYTDGYS
NRLDIISYDLCNWNGNNDSSSISWDSASTIRDLQKPNIPLIKQYKGPYAHLIKNVIISA
HMPCPTGGTSNGSISPQDFATLANTKIQDINSSSPWFLQNYKAIVSKVGDGLEYYGH
VGTVYFRPFHEVNGNWFWWGDKDVSQYKQLWINLHDYLVSKNSGCRGLTWLKFC
YAPNSGKNAALYYPGDDYVDMVGMDAYSDNPSTDTYVKRAYAELTGGTYNGVTY
PGIDKPFGFPELGPNVGGDYVDNKNRLIKKFDYKRWSDAIKLNYPKASYFIIWNGGY
EPRNNDNGTSLFNMSY

[0184] Mannan endo-1,4-beta-mannosidase (EC 3.2.1.78) (Endo-(1,4)-beta-mannanase) Rhodothermus marinus (strain ATCC 43812/DSM 4252/R-10) (Rhodothermus obamensis)

MTLLLVWLIFTGVAGEIRLEAEDGELLGVAVDSTLTGYSGRGYVTGFDAPEDSVRFS
FEAPRGVYRVVFGVSFSSRFASYALRVDDWHQTGSLIKRGGGFFEASIGEIWLDEGA
HTMAFQLMNGALDYVRLEPVSYGPPARPPAQLSDSQATASAQALFAFLLSEYGRHIL
AGQQQNPYRRDFDAINYVRNVTGKEPALVSFDLIDYSPTREAHGVVHYQTPEDWIA
WAGRDGIVSLMWHWNAPTDLIEDPSQDCYWWYGFYTRCTTFDVAAALADTSSERY
RLLLRDIDVIAAQLQKFQQADIPVLWRPLHEAAGGWFWWGAKGPEPFKQLWRLLY
ERLVHHHGLHNLIWVYTHEPGAAEWYPGDAYVDIVGRDVYADDPDALMRSDWNE
LQTLFGGRKLVALTETGTLPDVEVITDYGIWWSWFSIWTDPFLRDVDPDRLTRVYHS
ERVLTRDELPDWRSYVLHATTVQPAGDLALAVYPNPGAGRLHVEVGLPVAAPVVV
EVFNLLGQRVFQYQAGMQPAGLWRRAFELALAPGVYLVQVRAGNLVARRRWVSV
R

[0185] Mannan endo-1,4-beta-mannosidase (EC 3.2.1.78) (1,4-beta-D-mannan mannanohydrolase) (Beta-mannanase) Streptomyces lividans

MRNARSTLITTAGMAFAVLGLLFALAGPSAGRAEAAAGGIHVSNGRVVEGNGSAFV
MRGVNHAYTWYPDRTGSIADIAAKGANTVRVVLSSGGRWTKTSASEVSALIGQCKA
NKVICVLEVHDTTGYGKDGATSLDQAGDYWVGVKSAAWRAQEDYVVVNIGNEPF
GNTNYAAWTDATKSAIGKLRGAGLGHALMVDAPNWGQDWSGTMRSNAASVFASD
PDRNTVFSIHMYGVYDTAAEVRDYLNAFVGNGLPIVVGEFGDQHSDGNPDEDAIMA
TAQSLGVGYLGWSWSGNGGGVEYLDMVNGFDPNSLTSWGNRILYGSNGIAATSRT
ATVYGGGGGSTGGTAPNGYPYCVNGGASDPDGDGWGWENSRSCVVRGSAADH

[0186] Mannan endo-1,4-beta-mannosidase man26A (EC 3.2.1.78) (Endo-(1,4)-beta-mannanase man26A) Aspergillus niger (strain ATCC MYA-4892/CBS 513.88/FGSC A1513)

MFAKLSLLSLLESSAALGASNQTLSYGNIDKSATPEARALLKYIQLQYGSHYISGQQD
IDSWNWVEKNIGVAPAILGSDFTYYSPSAVAHGGKSHAVEDVIQHAGRNGINALVW
HWYAPTCLLDTAKEPWYKGFYTEATCFNVSEAVNDHGNGTNYKLLLRDIDAIAAQI
KRLDQAKVPILFRPLHEPEGGWFWWGAQGPAPFKKLWDILYDRITRYHNLHNMVW
VCNTADPAWYPGNDKCDIATIDHYPAVGDHGVAADQYKKLQTVINNERVLAMAE
VGPIPDPDKQARENVNWAYWMVWSGDFIEDGKQNPNQFLHKVYNDTRVVALNWE
GA

[0187] Mannan endo-1,4-beta-mannosidase C (EC 3.2.1.78) (Endo-beta-1,4-mannanase C) Emericella nidulans (strain FGSC Δ4/ATCC 38163/CBS 112.46/NRRL 194/M139) (Aspergillus nidulans)

MIFSTLLSLALLATTATARKGFVTTKGDKFQLDGKDFYFAGSNAYYFPFNNNQTDVE
LGLSAAKKAGLLVFRTWGFNDKNVTYIEDGLPQYGGEGAGTTEVVFQWWQNGTST
IDLEPFDKVVNAAAKTGIKLIVTLVNNWADYGGMDVYTVNLGGQYHDDFYRLPQIK
KAYKRYVKEMVTRYRNSPAIMAWELANEPRCGADGVRNLPASDECTPELLTSWIDE
MSTYVKRLDPHHLVTWGGEGGFNYDSDDWAYNGSDGGDFEAELKLKNIDFGVFHS
YPDWWSKTVEWTNKWIVDHARAARRVGKPVVHEEYGWLTPQGRLDNLGTVSNIT
RLEAVGGWQSISLREKMSDMFWQFGYSGYSYGRNHDDGFTIYLDDAEAQELVYKH
AKEVNKLNRRR

[0188] Probable mannan endo-1,4-beta-mannosidase A (EC 3.2.1.78) (Endo-beta-1,4-mannanase A) Aspergillus oryzae (strain ATCC 42149/RIB 40) (Yellow koji mold)

MKLNPSLLTAAGLVSAQLASALPQASSSTVSPSPSPSATPGSFVTTSGLNFVIDGKTG
YFAGSNSYWIGFQKNNDDVDLVFSHLQESGLKILRVWGFNDVNQKPTDGSVYYHLL
ADGTATVNEGEDGLQRLDYVVSSAEKHGIKLIINFVNFWDDYGGINAYVKAFGGSK
EGFYTNDAMQAAYRAYIKAVISRYSDSTAIFAWELANEPRCQGCETTVLYNWIESTS
QYIKSLDSKHLVCIGDEGFGLDTGSDGSYPYQYSEGSDFAKNLAIPTIDFGTFHLYPSS
WGTTNDWGNGWVTSHGAACKAAGKPCLFEEYGVTSDHCAVEKPWQNTALNTTAI
SGDLYWQYGDQLSGGPSPDDGNTFYYGTDDFKCLVTDHIAAINSRK

[0189] Mannan endo-1,4-beta-mannosidase A (EC 3.2.1.78) (Beta-mannanase 5A) (Man5A) (Beta-mannanase I/II) (BMANI) (BMANII) (Endo-beta-1,4-mannanase A)Hypocrea jecorina (strain ATCC 56765/BCRC 32924/NRRL 11460/Rut C-30) (Trichoderma reesei)

MMMLSKSLLSAATAASALAAVLQPVPRASSFVTISGTQFNIDGKVGYFAGTNCYWC
SFLTNHADVDSTFSHISSSGLKVVRVWGFNDVNTQPSPGQIWFQKLSATGSTINTGA
DGLQTLDYVVQSAEQHNLKLIIPFVNNWSDYGGINAYVNAFGGNATTWYTNTAAQ
TQYRKYVQAVVSRYANSTAIFAWELGNEPRCNGCSTDVIVQWATSVSQYVKSLDSN
HLVTLGDEGLGLSTGDGAYPYTYGEGTDFAKNVQIKSLDFGTFHLYPDSWGTNYTW
GNGWIQTHAAACLAAGKPCVFEEYGAQQNPCTNEAPWQTTSLTTRGMGGDMFWQ
WGDTFANGAQSNSDPYTVWYNSSNWQCLVKNHVDAINGGTTTPPPVSSTTTTSSRT
SSTPPPPGGSCSPLYGQCGGSGYTGPTCCAQGTCIYSNYWYSQCLNT

[0190] Suitable exogenous or heterologous nucleic acid sequences encoding a protein with serine protease activity may also include nucleic acid sequences which can be derived as a result of the degenerate genetic code from the amino acid sequences identified above as well as functional equivalents with serine protease activity.

[0191] Suitable exogenous or heterologous nucleic acid sequences that that encode a protein with cellulase activity include, but are not limited to, a nucleic acid sequences that code for proteins or polypeptides having cellulase activity with at least 50% identity or similarity (e.g., at least 60%, at least 70%, at least 80%, at least 90%, at least 95%, at least 96%, at least 97%, at least 98%, or at least 99%) at the amino acid level with the following sequences:

[0192] Endoglucanase D (EGD) (EC 3.2.1.4) (Cellulase D) (Endo-1,4-beta-glucanase) Acetivihrin thermocellus (Imugateiclostridium thermocellum) (Clostridium thermocellum)

SLTGVFPSGLIETKVSAAKITENYQFDSRIRLNSIGFIPNHSKKATIAANCSTFYVVKED
GTIVYTGTATSMFDNDTKETVYIADFSSVNEEGTYYLAVPGVGKSVNFKIAMNVYE
DAFKTAMLGMYLLRCGTSVSATYNGIHYSHGPCHTNDAYLDYINGQHTKKDSTKG
WHDAGDYNKYVVNAGITVGSMFLAWEHFKDQLEPVALEIPEKNNSIPDFLDELKYEI
DWILTMQYPDGSGRVAHKVSTRNFGGFIMPENEHDERFFVPWSSAATADFVAMTA
MAARIFRPYDPQYAEKCINAAKVSYEFLKNNPANVFANQSGFSTGEYATVSDADDR
LWAAAEMWETLGDEEYLRDFENRAAQFSKKIEADFDWDNVANLGMFTYLLSERPG
KNPALVQSIKDSLLSTADSIVRTSQNHGYGRTLGTTYYWGCNGTVVRQTMILQVAN
KISPNNDYVNAALDAISHVFGRNYYNRSYVTGLGINPPMNPHDRRSGADGIWEPWP
GYLVGGGWPGPKDWVDIQDSYQTNEIAINWNAALIYALAGFVNYNSPQNEVLYGD
VNDDGKVNSTDLTLLKRYVLKAVSTLPSSKAEKNADVNRDGRVNSSDVTILSRYLIR
VIEKLPI

[0193] Endoglucanase C (EC 3.2.1.4) (Cellulase C) (Endo-1,4-beta-glucanase C) (EgC) Acetivibrio thermocellus (Hungateiclostridium thermocellum) (Clostridium thermocellum)

MVSFKAGINLGGWISQYQVFSKEHFDTFITEKDIETIAEAGFDHVRLPFDYPIIESDDN
VGEYKEDGLSYIDRCLEWCKKYNLGLVLDMHHAPGYRFQDFKTSTLFEDPNQQKRF
VDIWRFLAKRYINEREHIAFELLNEVVEPDSTRWNKLMLEYIKAIREIDSTMWLYIGG
NNYNSPDELKNLADIDDDYIVYNFHFYNPFFFTHQKAHWSESAMAYNRTVKYPGQY
EGIEEFVKNNPKYSFMMELNNLKLNKELLRKDLKPAIEFREKKKCKLYCGEFGVIAI
ADLESRIKWHEDYISLLEEYDIGGAVWNYKKMDFEIYNEDRKPVSQELVNILARRKT

[0194] Endoglucanase (EC 3.2.1.4) Acetivibrio thermocellus (Hungateiclostridium thermocellum) (Clostridium thermocellum)

YILPQPDVRVNQVGYLPEGKKVATVVCNSTQPVKWQLKNAAGVVVLEGYTEPKGL
DKDSQDYVHWLDFSDFATEGIGYYFELPTVNSPTNYSHPFDIRKDIYTQMKYDALAF
FYHKRSGIPIEMPYAGGEQWTRPAGHIGIEPNKGDTNVPTWPQDDEYAGIPQKNYTK
DVTGGWYDAGDHGKYVVNGGIAVWTLMNMYERAKIRGLDNWGPYRDGGMNIPE
QNNGYPDILDEARWEIEFFKKMQVTEKEDPSIAGMVHHKIHDFRWTALGMLPHEDP
QPRYLRPVSTAATLNFAATLAQSARLWKDYDPTFAADCLEKAEIAWQAALKHPDIY
AEYTPGSGGPGGGPYNDDYVGDEFYWAACELYVTTGKDEYKNYLMNSPHYLEMP
AKMGENGGANGEDNGLWGCFTWGTTQGLGTITLALVENGLPATDIQKARNNIAKA
ADRWLENIEEQGYRLPIKQAEDERGGYPWGSNSFILNQMIVMGYAYDFTGDSKYLD
GMFDGISYLLGRNAMDQSYVTGYGERPLQNPHDRFWTPQTSKRFPAPPPGIISGGPN
SRFEDPTINAAVKKDTPPQKCFIDHTDSWGTNEITVNWNAPFAWVTAYLDE

[0195] Cellulase/esterase CelE (CtCel5C-CE2) [Includes: Cellulase E (EC 3.2.1.4) (CtCel5C) (Endo-1,4-beta-glucanase E) (EGE) (Endoglucanase E); Acetylxylan esterase/glucomannan deacetylase (EC 3.1.1.→(EC 3.1.1.72) (CtCE2)]Acetivibrio thermocellus (strain ATCC 27405/DSM 1237/JCM 9322/NBRC 103400/NCIMB 10682/NRRL B-4536/VPI 7372) (Clostridium thermocellum)

MKKIVSLVCVLVMLVSILGSFSVVAASPVKGFQVSGTKLLDASGNELVMRGMRDIS
AIDLVKEIKIGWNLGNTLDAPTETAWGNPRTTKAMIEKVREMGFNAVRVPVTWDTH
IGPAPDYKIDEAWLNRVEEVVNYVLDCGMYAIINVHHDNTWIIPTYANEQRSKEKLV
KVWEQIATRFKDYDDHLLFETMNEPREVGSPMEWMGGTYENRDVINRFNLAVVNTI
RASGGNNDKRFILVPTNAATGLDVALNDLVIPNNDSRVIVSIHAYSPYFFAMDVNGT
SYWGSDYDKASLTSELDAIYNRFVKNGRAVIIGEFGTIDKNNLSSRVAHAEHYAREA
VSRGIAVFWWDNGYYNPGDAETYALLNRKTLSWYYPEIVQALMRGAGVEPLVSPT
PTPTLMPTPSPTVTANILYGDVNGDGKINSTDCTMLKRYILRGIEEFPSPSGIIAADVN
ADLKINSTDLVLMKKYLLRSIDKFPAEDSQTPDEDNPGILYNGRFDFSDPNGPKCAW
SGSNVELNFYGTEASVTIKSGGENWFQAIVDGNPLPPFSVNATTSTVKLVSGLAEGA
HHLVLWKRTEASLGEVQFLGFDFGSGKLLAAPKPLERKIEFIGDSITCAYGNEGTSKE
QSFTPKNENSYMSYAAITARNLNASANMIAWSGIGLTMNYGGAPGPLIMDRYPYTLP
YSGVRWDFSKYVPQVVVINLGTNDFSTSFADKTKFVTAYKNLISEVRRNYPDAHIFC
CVGPMLWGTGLDLCRSYVTEVVNDCNRSGDLKVYFVEFPQQDGSTGYGEDWHPSI
ATHQLMAERLTAEIKNKLGW

[0196] Endoglucanase 1 (EC 3.2.1.4) (Cellulase I) (Endo-1,4-beta-glucanase) (Endoglucanase I) (EGI) Acetivibrio thermocellus (strain ATCC 27405/DSM 1237/JCM 9322/NBRC 103400/NCIMB 10682/NRRL B-4536/VPI 7372) (Clostridium thermocellum)

MRLVNSLGRRKILLILAVIVAFSTVLLFAKLWGRKTSSTLDEVGSKTHGDLTAENKN
GGYLPEEEIPDQPPATGAFNYGEALQKAIFFYECQRSGKLDPSTLRLNWRGDSGLDD
GKDAGIDLTGGWYDAGDHVKFNLPMSYSAAMLGWAVYEYEDAFKQSGQYNHILN
NIKWACDYFIKCHPEKDVYYYQVGDGHADHAWWGPAEVMPMERPSYKVDRSSPG
STVVAETSAALAIASIIFKKVDGEYSKECLKHAKELFEFADTTKSDDGYTAANGFYNS
WSGFYDELSWAAVWLYLATNDSSYLDKAESYSDKWGYEPQTNIPKYKWAQCWDD
VTYGTYLLLARIKNDNGKYKEAIERHLDWWTTGYNGERITYTPKGLAWLDQWGSL
RYATTTAFLACVYSDWENGDKEKAKTYLEFARSQADYALGSTGRSFVVGFGENPPK
RPHHRTAHGSWADSQMEPPEHRHVLYGALVGGPDSTDNYTDDISNYTCNEVACDY
NAGFVGLLAKMYKLYGGSPDPKFNGIEEVPEDEIFVEAGVNASGNNFIEIKAIVNNKS
GWPARVCENLSFRYFINIEEIVNAGKSASDLQVSSSYNQGAKLSDVKHYKDNIYYVE
VDLSGTKIYPGGQSAYKKEVQFRISAPEGTVFNPENDYSYQGLSAGTVVKSEYIPVY
DAGVLVFGREPGSASKSTSKDNGLSKATPTVKTESQPTAKHTQNPASDFKTPANQNS
VKKDQGIKGEVVLQYANGNAGATSNSINPRFKIINNGTKAINLSDVKIRYYYTKEGG
ASQNFWCDWSSAGNSNVTGNFFNLSSPKEGADTCLEVGFGSGAGTLDPGGSVEVQI
RFSKEDWSNYNQSNDYSFNPSASDYTDWNRVTLYISNKLVYGKEP

[0197] Endoglucanase A (EGA) (EC 3.2.1.4) (Cellulase A) (Endo-1,4-beta-glucanase) Acetivibrio thermocellus (strain ATCC 27405/DSM 1237/JCM 9322/NBRC 103400/NCIMB 10682/NRRL B-4536/VPI 7372) (Clostridium thermocellum)

MKNVKKRVGVVLLILAVLGVYMLAMPANTVSAAGVPFNTKYPYGPTSIADNQSEV
TAMLKAEWEDWKSKRITSNGAGGYKRVQRDASTNYDTVSEGMGYGLLLAVCFNE
QALFDDLYRYVKSHFNGNGLMHWHIDANNNVTSHDGGDGAATDADEDIALALIFA
DKLWGSSGAINYGQEARTLINNLYNHCVEHGSYVLKPGDRWGGSSVTNPSYFAPA
WYKVYAQYTGDTRWNQVADKCYQIVEEVKKYNNGTGLVPDWCTASGTPASGQSY
DYKYDATRYGWRTAVDYSWFGDQRAKANCDMLTKFFARDGAKGIVDGYTIQGSKI
SNNHNASFIGPVAAASMTGYDLNFAKELYRETVAVKDSEYYGYYGNSLRLLTLLYIT
GNFPNPLSDLSGQPTPPSNPTPSLPPQVVYGDVNGDGNVNSTDLTMLKRYLLKSVTN
INREAADVNRDGAINSSDMTILKRYLIKSIPHLPY

[0198] Endoglucanase D (EGD) (EC 3.2.1.4) (Cellulase D) (Endo-1,4-beta-glucanase) Acetivibrio thermocellus (strain ATCC 27405/DSM 1237/JCM 9322/NBRC 103400/NCIMB 10682/NRRL B-4536/VPI 7372) (Clostridium thermocellum)

MSRMTLKSSMKKRVLSLLIAVVFLSLTGVFPSGLIETKVSAAKITENYQFDSRIRLNSI
GFIPNHSKKATIAANCSTFYVVKEDGTIVYTGTATSMFDNDTKETVYIADFSSVNEEG
TYYLAVPGVGKSVNFKIAMNVYEDAFKTAMLGMYLLRCGTSVSATYNGIHYSHGP
CHTNDAYLDYINGQHTKKDSTKGWHDAGDYNKYVVNAGITVGSMFLAWEHFKDQ
LEPVALEIPEKNNSIPDFLDELKYEIDWILTMQYPDGSGRVAHKVSTRNFGGFIMPEN
EHDERFFVPWSSAATADFVAMTAMAARIFRPYDPQYAEKCINAAKVSYEFLKNNPA
NVFANQSGFSTGEYATVSDADDRLWAAAEMWETLGDEEYLRDFENRAAQFSKKIE
ADFDWDNVANLGMFTYLLSERPGKNPALVQSIKDSLLSTADSIVRTSQNHGYGRTL
GTTYYWGCNGTVVRQTMILQVANKISPNNDYVNAALDAISHVFGRNYYNRSYVTG
LGINPPMNPHDRRSGADGIWEPWPGYLVGGGWPGPKDWVDIQDSYQTNEIAINWN
AALIYALAGFVNYNSAQNEVLYGDVNDDGKVNSTDLTLLKRYVLKAVSTLPSSKAE
KNADVNRDGRVNSSDVTILSRYLIRVIEKLPI

[0199] Endoglucanase H (EC 3.2.1.4) (Cellulase H) (Endo-1,4-beta-glucanase H) (EgH) Acetivibrio thermocellus (strain ATCC 27405/DSM 1237/JCM 9322/NBRC 103400/NCIMB 10682/NRRL B-4536/VPI 7372) (Clostridium thermocellum)

MKKRLLVSFLVLSIIVGLLSFQSLGNYNSGLKIGAWVGTQPSESAIKSFQELQGRKLDI
VHQFINWSTDFSWVRPYADAVYNNGSILMITWEPWEYNTVDIKNGKADAYITRMA
QDMKAYGKEIWLRPLHEANGDWYPWAIGYSSRVNTNETYIAAFRHIVDIFRANGAT
NVKWVFNVNCDNVGNGTSYLGHYPGDNYVDYTSIDGYNWGTTQSWGSQWQSFDQ
VFSRAYQALASINKPIIIAEFASAEIGGNKARWITEAYNSIRTSYNKVIAAVWFHENKE
TDWRINSSPEALAAYREAIGAGSSNPTPTPTWTSTPPSSSPKAVDPFEMVRKMGMGT
NLGNTLEAPYEGSWSKSAMEYYFDDFKAAGYKNVRIPVRWDNHTMRTYPYTIDKA
FLDRVEQVVDWSLSRGFVTIINSHHDDWIKEDYNGNIERFEKIWEQIAERFKNKSENL
LFEIMNEPFGNITDEQIDDMNSRILKIIRKTNPTRIVIIGGGYWNSYNTLVNIKIPDDPY
LIGTFHYYDPYEFTHKWRGTWGTQEDMDTVVRVFDFVKSWSDRNNIPVYFGEFAV
MAYADRTSRVKWYDFISDAALERGFACSVWDNGVFGSLDNDMAIYNRDTRTFDTEI
LNALFNPGTYPSYSPKPSPTPRPTKPPVTPAVGEKMLDDFEGVLNWGSYSGEGAKVS
TKIVSGKTGNGMEVSYTGTTDGYWGTVYSLPDGDWSKWLKISFDIKSVDGSANEIR
FMIAEKSINGVGDGEHWVYSITPDSSWKTIEIPFSSFRRRLDYQPPGQDMSGTLDLDNI
DSIHFMYANNKSGKFVVDNIKLIGATSDPTPSIKHGDLNFDNAVNSTDLLMLKRYILK
SLELGTSEQEEKFKKAADLNRDNKVDSTDLTILKRYLLKAISEIPI

[0200] Cellulase/esterase CelE (CtCel5C-CE2) [Includes: Cellulase E (EC 3.2.1.4) (CtCel5C) (Endo-1,4-beta-glucanase E) (EGE) (Endoglucanase E); Acetylxylan esterase/glucomannan deacetylase (EC 3.1.1.→(EC 3.1.1.72) (CtCE2)]Acetivibrio thermocellus (strain ATCC 27405/DSM 1237/JCM 9322/NBRC 103400/NCIMB 10682/NRRL B-4536/VPI 7372) (Clostridium thermocellum)

MKKIVSLVCVLVMLVSILGSFSVVAASPVKGFQVSGTKLLDASGNELVMRGMRDIS
AIDLVKEIKIGWNLGNTLDAPTETAWGNPRTTKAMIEKVREMGFNAVRVPVTWDTH
IGPAPDYKIDEAWLNRVEEVVNYVLDCGMYAIINVHHDNTWIIPTYANEQRSKEKLV
KVWEQIATRFKDYDDHLLFETMNEPREVGSPMEWMGGTYENRDVINRFNLAVVNTI
RASGGNNDKRFILVPTNAATGLDVALNDLVIPNNDSRVIVSIHAYSPYFFAMDVNGT
SYWGSDYDKASLTSELDAIYNRFVKNGRAVIIGEFGTIDKNNLSSRVAHAEHYAREA
VSRGIAVFWWDNGYYNPGDAETYALLNRKTLSWYYPEIVQALMRGAGVEPLVSPT
PTPTLMPTPSPTVTANILYGDVNGDGKINSTDCTMLKRYILRGIEEFPSPSGIIAADVN
ADLKINSTDLVLMKKYLLRSIDKFPAEDSQTPDEDNPGILYNGRFDFSDPNGPKCAW
SGSNVELNFYGTEASVTIKSGGENWFQAIVDGNPLPPFSVNATTSTVKLVSGLAEGA
HHLVLWKRTEASLGEVQFLGFDFGSGKLLAAPKPLERKIEFIGDSITCAYGNEGTSKE
QSFTPKNENSYMSYAAITARNLNASANMIAWSGIGLTMNYGGAPGPLIMDRYPYTLP
YSGVRWDFSKYVPQVVVINLGTNDFSTSFADKTKFVTAYKNLISEVRRNYPDAHIFC
CVGPMLWGTGLDLCRSYVTEVVNDCNRSGDLKVYFVEFPQQDGSTGYGEDWHPSI
ATHQLMAERLTAEIKNKLGW

[0201] Endoglucanase E1 (EC 3.2.1.4) (Cellulase E1) (Endo-1,4-beta-glucanase E1) (Endocellulase E1)Acidothermus cellulolyticus (strain ATCC 43068/DSM 8971/11B)

MPRALRRVPGSRVMLRVGVVVAVLALVAALANLAVPRPARAAGGG
YWHTSGREILDANNVPVRIAGINWFGFETCNYVVHGLWSRDYRSM
LDQIKSLGYNTIRLPYSDDILKPGTMPNSINFYQMNQDLQGLTSL
QVMDKIVAYAGQIGLRIILDRHRPDCSGQSALWYTSSVSEATWIS
DLQALAQRYKGNPTVVGFDLHNEPHDPACWGCGDPSIDWRLAAER
AGNAVLSVNPNLLIFVEGVQSYNGDSYWWGGNLQGAGQYPVVLNV
PNRLVYSAHDYATSVYPQTWFSDPTFPNNMPGIWNKNWGYLFNQN
IAPVWLGEFGTTLQSTTDQTWLKTLVQYLRPTAQYGADSFQWTFW
SWNPDSGDTGGILKDDWQTVDTVKDGYLAPIKSSIFDPVGASASP
SSQPSPSVSPSPSPSPSASRTPTPTPTPTASPTPTLTPTATPTPT
ASPTPSPTAASGARCTASYQVNSDWGNGFTVTVAVTNSGSVATKT
WTVSWTFGGNQTITNSWNAAVTQNGQSVTARNMSYNNVIQPGQNT
TFGFQASYTGSNAAPTVACAAS

[0202] Endoglucanase E1 (EC 3.2.1.4) (Cellulase E1) (Endo-1,4-beta-glucanase E1) (Endocellulase E1)Acidothermus cellulolyticus (strain ATCC 43068/DSM 8971/11B)

MPRALRRVPGSRVMLRVGVVVAVLALVAALANLAVPRPARAAGGG
YWHTSGREILDANNVPVRIAGINWFGFETCNYVVHGLWSRDYRSM
LDQIKSLGYNTIRLPYSDDILKPGTMPNSINFYQMNQDLQGLTSL
QVMDKIVAYAGQIGLRIILDRHRPDCSGQSALWYTSSVSEATWIS
DLQALAQRYKGNPTVVGFDLHNEPHDPACWGCGDPSIDWRLAAER
AGNAVLSVNPNLLIFVEGVQSYNGDSYWWGGNLQGAGQYPVVLNV
PNRLVYSAHDYATSVYPQTWFSDPTFPNNMPGIWNKNWGYLFNQN
IAPVWLGEFGTTLQSTTDQTWLKTLVQYLRPTAQYGADSFQWTFW
SWNPDSGDTGGILKDDWQTVDTVKDGYLAPIKSSIFDPVGASASP
SSQPSPSVSPSPSPSPSASRTPTPTPTPTASPTPTLTPTATPTPT
ASPTPSPTAASGARCTASYQVNSDWGNGFTVTVAVTNSGSVATKT
WTVSWTFGGNQTITNSWNAAVTQNGQSVTARNMSYNNVIQPGQNT
TFGFQASYTGSNAAPTVACAAS

[0203] Endoglucanase (EC 3.2.1.4) Alicyclobacillus acidocaldarius subsp. acidocaldarius (Bacillus acidocaldarius)

MPSRVPKSIFYNQVGYLISGDKRFWIQAHEPQPFALRTPEGQAVF
AGMTKPVGGNWYVGDFTALRVPGTYTLTVGTLEARVVIHRRAYRD
VLEAMLRFFDYQLCGVVLPEDEAGPWAHGACHTSDAKVFGTERAL
ACPGGWHDAGDYGKYTVPAAKAVADLLLAHEYFPAALAHVRPMRS
VHRAPHLPPALEVAREEIAWLLTMQDPATGGVYHKVTTPSFPPLD
TRPEDDDAPLVLSPISYAATATFCAAMAHAALVYRPFDPALSSCC
ADAARRAYAWLGAHEMQPFHNPDGILTGEYGDAELRDELLWASCA
LLRMTGDSAWARVCEPLLDLDLPWELGWADVALYGVMDYLRTPRA
AVSDDVRNKVKSRLLRELDALAAMAESHPFGIPMRDDDFIWGSNM
VLLNRAMAFLLAEGVGVLHPAAHTVAQRAADYLFGANPLGQCYVT
GFGQRPVRHPHHRPSVADDVDHPVPGMVVGGPNRHLQDEIARAQL
AGRPAMEAYIDHQDSYSTNEVAVYWNSPAVFVIAALLEARGR

[0204] cellulase (EC 3.2.1.4) Aliivibrio fischeri (strain ATCC 700601/ES 114) (Vibrio fischeri)

MKMQLTVLSLLIGTLTCSSSAIAQDENYTTPIVSSAALTKENQCE
WGQWESFKQHYIENGRVVDNSDPRLITTSEGQSYALFFALIANDK
KTFDELLGWTELHLAGGDLTAQLPAWLWGRQPDGSQGILDSNSAA
DSDLWIAYSLLEAGRLWDNHYYQSLGHLLASRILRDETIKVSGLG
TVLLPGKVGFVLGKNHVRLNPSYVPLQLLTRMNTVFPSYQWEEIY
QSSAKLLKETMPKGYSPDWVEWDKTQFKKDSKTQSVGSYNAIRVY
LWAGMLPDSDPNKALLLDKMKPLVRVIERNKGMPETINVLTGKGK
NQGGVGMNAAILPLLSSLDSNTNAVEYEKKIQAELSKIESDYYYN
SVLTLFGLGWYQDLYSFNDDGSVTPKWVNVCQ

[0205] Probable endo-beta-1,4-glucanase D (Endoglucanase D) (EC 3.2.1.4) (Carboxymethylcellulase D) (Cellulase D) Aspergillus fumigatus (strain CBS 144.89/FGSC A 1163/CEΔ10) (Neosartorya fumigata)

MKSTFGLLALAAAAKLVSAHATVHAVWINDVDQGAGNSADGYIRS
PPNNSPITDVTSTDMTCNVNGKNPVAKTLSVKAGDKVTFEWHHDT
RSDSDDIIASSHMGPVMVYMAPTEKGTAGNGWVKIAEEGYSNGKW
AVANLIANRGKHSITVPDVPAGEYLLRPEIIALHEGNRQGGAQFY
MECVQVKVTSAGTKTLPAGVSIPGAYKATDPGVLFDMYNSFTSYP
IPGPAVWDGSSSGSSGSSGSSPATTTAPAVSVTAVPTKEAPVDTS
ATPTTFVTATKPATTAAPAAPSASSGSNSGSDSCNSGSASGSVKI
YGQCGGQNYSGPTSCEAGLICKEWNPYYHQCVSA

[0206] Probable endo-beta-1,4-glucanase B (Endoglucanase B) (EC 3.2.1.4) (Carboxymethylcellulase B) (Cellulase B) Aspergillus niger (strain ATCC MYA-4892/CBS 513.88/FGSC A1513)

MKFQSTLLLAAAAGSALAVPHGSGHKKRASVFEWFGSNESGAEFG
TNIPGVWGTDYIFPDPSTISTLIGKGMNFFRVQFMMERLLPDSMT
GSYDEEYLANLTTVVKAVTDGGAHALIDPHNYGRYNGEIISSTSD
FQTFWQNLAGQYKDNDLVMFDTNNEYYDMDQDLVLNLNQAAINGI
RAAGASQYIFVEGNSWTGAWTWVDVNDNMKNLTDPEDKIVYEMHQ
YLDSDGSGTSETCVSGTIGKERITDATQWLKDNKKVGFIGEYAGG
SNDVCRSAVSGMLEYMANNTDVWKGASWWAAGPWWGDYIFSLEPP
DGTAYTGMLDILETYL

[0207] Cellulase 12A (Endo-beta-1,4-glucanase (EC 3.2.1.4)) (Endoglucanase S) (Glycoside hydrolase) Bacillus licheniformis

MKNNHLLKSILLWGAVCIIVLAGPLSAFAASSSNPSDKLYFKNKK
YYIFNNVWGADQVSGWWQTIYHNSDSDMGWVWNWPSNTSTVKAYP
SIVSGWHWTEGYTAGSGFPTRLSDQKNINTKVSYSISANGTYNAA
YDIWLHNTNKASWDSAPTDEIMIWLNNTNAGPAGSYVETVSIGGH
SWKVYKGYIDAGGGKGWNVFSFIRTANTQSANLNIRDFTNYLADS
KQWLSKTKYVSSVEFGTEVFGGTGQINISNWDVTVR

[0208] Cellulase (EC 3.2.1.4)Bacillus licheniformis (strain ATCC 14580/DSM 13/JCM 2505/CCUG 7422/NBRC 12200/NCIMB 9375/NCTC 10341/NRRL NRS-1264/Gibson 46)

MREKWLALCLKSIILFVLIMGTVLLSAVPKASGTSGPAKQEKQSI
ITPADLLENMSPGWNLGNTLDAVPTEGSWNNPPVREHTFDDIRDA
GFKSVRIPVTWDSHIGSAPEYPIDTDWMNRVEEVTDWALEREFYV
VLNIHHDSWLWISRMGNSQQETLDKLGKVWKQIAERFKNKSERLL
FEIVNEPTGMSAYQMNLLNREMLNIIRSTGGKNGQRLVIVGGLED
NKDELLHSFEPPDDDRIVLTYHYYSPWDYVSNWWGRTTWGSAAEI
SEMEEDIKPVYEKFVREGYPVIIGEYGTLGANEKHSKWLYHDTFV
RLAHKYQMVPMWWDNGNDQFDRAERQWRDPVVKEIVIQAGRGVPN
AIIKPADLFIKKGQSISDQTVDIQLNGNVLTGIYQKSEPLKEGSD
YTVDNAGKTVSIKASCLAKLLNGAGQPGVKAQLTFTFHKGASQVM
DIILYDDPKLEKSEFTISQSAISGDLKIPASLNGTKLATVKGVVD
STGRPVLEEVWSWTPYLNYDEDFYEKDGDLYLKERVLKYLKSDST
FTFELWPKGVEAVVKVKITP

[0209] Endoglucanase A (EC 3.2.1.4) (Endo-1,4-beta-glucanase A) Bacillus pumilus (Bacillus mesentericus)

MLIFETYLILFKTVQITKRRIERRRLRLLNQCFTKKEGVSNREMA
SYNYVEVLQKSMLFYEAQRSGRLPESNRLNWRGDSGLKDGKDVGH
DLTGGWYDAGDHVKFGLPMAYSAAVLAWTVYEYREAYEEAELLDE
ILDQIKWATDYFLKAHTGPNEFWAQVGDGNADHAWWGPAEVMPMN
RPAFKIDEHCPGTEVAAQTAAALAAGSIIFKETDASYAAKLLTHA
KQLYAFADRYRGKYTDCVTNAQPFYNSWSGYVDELIWGGIWLYLA
TNEETYLNKALKAVEEWPQDWDYTFTMSWDNTFFASQILLARITK
ENRFIESTERNLDYWTTGLVQNGKVERITYTPGGLAWLDQWGSLR
YAANAAFLAFVYADWVSDQEKKNRYQSFAIKQTHYMLGDNPLNRS
YVVGFGQNSPKHPHHRTAHGSWSNQLTNPPSHRHTLYGALVGGPN
AQDQYDDDISDYISNEVATDYNAAFTGNIAKMVQLFGEGQSKLPN
FPPKEQVEDEFFVEAAVMHNDTTSTQVKAVLYNRSGWPARSSQTL
SFRYYVNLSEVFAKGFTEKDIQVTAAYNEGASLSPLKVYDASSRV
YFAEIDFTGVVISPRGESEHKKEIQFRLSAPNGSNIWDASNDYSY
QGLTSNMQKTTKIPVFEDGVLVFGTLPDK

[0210] Endoglucanase A (EC 3.2.1.4) (Endo-1,4-beta-glucanase A) Bacillus pumilus (Bacillus mesentericus)

MLIFETYLILFKTVQITKRRIERRRLRLLNQCFTKKEGVSNREMA
SYNYVEVLQKSMLFYEAQRSGRLPESNRLNWRGDSGLKDGKDVGH
DLTGGWYDAGDHVKFGLPMAYSAAVLAWTVYEYREAYEEAELLDE
ILDQIKWATDYFLKAHTGPNEFWAQVGDGNADHAWWGPAEVMPMN
RPAFKIDEHCPGTEVAAQTAAALAAGSIIFKETDASYAAKLLTHA
KQLYAFADRYRGKYTDCVTNAQPFYNSWSGYVDELIWGGIWLYLA
TNEETYLNKALKAVEEWPQDWDYTFTMSWDNTFFASQILLARITK
ENRFIESTERNLDYWTTGLVQNGKVERITYTPGGLAWLDQWGSLR
YAANAAFLAFVYADWVSDQEKKNRYQSFAIKQTHYMLGDNPLNRS
YVVGFGQNSPKHPHHRTAHGSWSNQLTNPPSHRHTLYGALVGGPN
AQDQYDDDISDYISNEVATDYNAAFTGNIAKMVQLFGEGQSKLPN
FPPKEQVEDEFFVEAAVMHNDTTSTQVKAVLYNRSGWPARSSQTL
SFRYYVNLSEVFAKGFTEKDIQVTAAYNEGASLSPLKVYDASSRV
YFAEIDFTGVVISPRGESEHKKEIQFRLSAPNGSNIWDASNDYSY
QGLTSNMQKTTKIPVFEDGVLVFGTLPDK

[0211] Cellulase (EC 3.2.1.4)Bacillus sp

MKKITTIFVVLLMTVALFSIGNTTAADNDSVVEEHGQLSISNGEL
VNERGEQVQLKGMSSHGLQWYGQFVNYESMKWLRDDWGITVFRAA
MYTSSGGYIDDPSVKEKVKEAVEAAIDLDIYVIIDWHILSDNDPN
IYKEEAKDFFDEMSELYGDYPNVIYEIANEPNGSDVTWDNRIKPY
AEEVIPVIRNNDPNNIIIVGTGTWSQDVHHAADNQLADPNVMYAF
HFYAGTHGQNLRDQVDYALDQGAAIFVSEWGTSAATGDGGVFLDE
AQEWIDFMDERNLSWANWSLTHKDESSAALMPGANPTGGWTEAEL
SPSGTFVREKIRESASIPPSDPTPPSDPGEYPAWDPTQIYTNEIV
YHNGQLWQAKWWTQNQEPGDPYGPWEPLN

[0212] Endoglucanase (EC 3.2.1.4) (Cellulase) (Endo-1,4-beta-glucanase) (Endo-K) Bacillus sp. (strain KSM-330)

MVEKRKIFTVLCACGIGFTSYTSCISAAAIDNDTLINNGHKINSS
IITNSSQVSAVAKEMKPFPQQVNYSGILKPNHVSQESLNNAVKNY
YNDWKKKYLKNDLSSLPGGYYVKGEITGNPDGFRPLGTSEGQGYG
MIITVLMAGHDSNAQTIYDGLFKTARAFKSSINPNLMGWVVADDK
KAQGHFDSATDGDLDIAYSLLLAHKQWGSSGKINYLKEAQNMITK
GIKASNVTKNNGLNLGDWGDKSTFDTRPSDWMMSHLRAFYEFTGD
KTWLNVIDNLYNTYTNFTNKYSPKTGLISDFVVKNPPQPAPKDFL
DESKYTDSYYYNASRVPLRIVMDYAMYGEKRGKVISDKVATWIKS
KTKGNPSKIVDGYKLDGTNIGDYPTAVYVSPFIAAGTTNSKNQEW
VNSGWDWMKNKKESYFSDSYNLLTMLFLTGNWWKPIPDEKKIQSP
INLEVQSELKEQD

[0213] Endoglucanase (EC 3.2.1.4) (Alkaline cellulase) (Endo-1,4-beta-glucanase) Bacillus sp. (strain KSM-635)

MKIKQIKQSLSLLLIITLIMSLFVPMASANTNESKSNAFPFSDVK
KTSWSFPYIKDLYEQEVITGTSATTFSPTDSVTRAQFTVMLTRGL
GLEASSKDYPFKDRKNWAYKEIQAAYEAGIVTGKTNGEFAPNENI
TREQMAAMAVRAYEYLENELSLPEEQREYNDSSSISTFAQDAVQK
AYVLELMEGNTDGYFQPKRNSTREQSAKVISTLLWKVASHDYLYH
TEAVKSPSEAGALQLVELNGQLTLAGEDGTPVQLRGMSTHGLQWF
GEIVNENAFVALSNDWGSNMIRLAMYIGENGYATNPEVKDLVYEG
IELAFEHDMYVIVDWHVHAPGDPRADVYSGAYDFFEEIADHYKDH
PKNHYIIWELANEPSPNNNGGPGLTNDEKGWEAVKEYAEPIVEML
REKGDNMILVGNPNWSQRPDLSADNPIDAENIMYSVHFYTGSHGA
SHIGYPEGTPSSERSNVMANVRYALDNGVAVFATEWGTSQANGDG
GPYFDEADVWLNFLNKHNISWANWSLTNKNEISGAFTPFELGRTD
ATDLDPGANQVWAPEELSLSGEYVRARIKGIEYTPIDRTKFTKLV
WDFNDGTTQGFQVNGDSPNKESITLSNNNDALQIEGLNVSNDISE
GNYWDNVRLSADGWSENVDILGATELTIDVIVEEPTTVSIAAIPQ
GPAAGWANPTRAIKVTEDDFESFGDGYKALVTITSEDSPSLETIA
TSPEDNTMSNIILFVGTEDADVISLDNITVSGTEIEIEVIHDEKG
TATLPSTFEDGTRQGWDWHTESGVKTALTIEEANGSNALSWEYAY
PEVKPSDGWATAPRLDFWKDELVRGTSDYISFDFYIDAVRASEGA
ISINAVFQPPANGYWQEVPTTFEIDLTELDSATVTSDELYHYEVK
INIRDIEAITDDTELRNLLLIFADEDSDFAGRVFVDNVRFE

[0214] Cellulase (EC 3.2.1.4) Bacillus sp. BG-CS10

MVHIQRKFILTKSLIVVFTMLLCLSLMTPPLLADEGAKQTDIQSY
VADMQPGWNLGNTFDAVGDDETAWGNPRVTRELIKTIADEGYKSI
RIPVTWENQMGNAPDYTINEDFFSRVEQVIDWALEEDLYVMLNLH
HDSWLWIYNMEHNYDEVMAKYTALWEQLSERFQGHSHKLMFESVN
EPRFTRDWGEIQENHHAFLEELNTAFYHIVRESGGSNTERPLVLP
TLETATSQDLLNRLHQTMKDLNDPNLIATVHYYGFWPFSVNVAGY
TRFEEETQQDIIDTFNRVHNTFTANGIPVVLGEFGLLGFDTSTDV
IQQGEKLKFFEFLIHHLNERDVTHMLWDNGQHLNRETYSWYDQEF
HNMLKASWEGRSATAESNLIHVRDGEPIRDQDIQLHLHGNELTGL
QVDGDSLALGEDYELAGDVLTMKADALTALMTPGELGTNAVITAQ
FNSGADWHFQLQNVDEPTLENTEGSTSNFAIPAHFNGDSVATMEA
VYANGEFAGPQNWTSFKEFGYTFSPVYDKGEIVITDAFFNEVRDD
DIHLTFHFWSGEMVEYTLSKNGNHVQGRR

[0215] Endoglucanase (EC 3.2.1.4) (Carboxymethyl-cellulase) (CMCase) (Cellulase) (Endo-1,4-beta-glucanase) Bacillus subtilis (strain 168)

MKRSISIFITCLLITLLTMGGMIASPASAAGTKTPVAKNGQLSIK
GTQLVNRDGKAVQLKGISSHGLQWYGEYVNKDSLKWLRDDWGITV
FRAAMYTADGGYIDNPSVKNKVKEAVEAAKELGIYVIIDWHILND
GNPNQNKEKAKEFFKEMSSLYGNTPNVIYEIANEPNGDVNWKRDI
KPYAEEVISVIRKNDPDNIIIVGTGTWSQDVNDAADDQLKDANVM
YALHFYAGTHGQFLRDKANYALSKGAPIFVTEWGTSDASGNGGVF
LDQSREWLKYLDSKTISWVNWNLSDKQESSSALKPGASKTGGWRL
SDLSASGTFVRENILGTKDSTKDIPETPSKDKPTQENGISVQYRA
GDGSMNSNQIRPQLQIKNNGNTTVDLKDVTARYWYKAKNKGQNFD
CDYAQIGCGNVTHKFVTLHKPKQGADTYLELGFKNGTLAPGASTG
NIQLRLHNDDWSNYAQSGDYSFFKSNTFKTTKKITLYDQGKLIWG
TEPN

[0216] Endoglucanase (EC 3.2.1.4) (Carboxymethyl-cellulase) (CMCase) (Cellulase) (Endo-1,4-beta-glucanase) Bacillus subtilis (strain 168)

MKRSISIFITCLLITLLTMGGMIASPASAAGTKTPVAKNGQLSIKGTQLVNRDGKAVQ
LKGISSHGLQWYGEYVNKDSLKWLRDDWGITVFRAAMYTADGGYIDNPSVKNKVK
EAVEAAKELGIYVIIDWHILNDGNPNQNKEKAKEFFKEMSSLYGNTPNVIYEIANEPN
GDVNWKRDIKPYAEEVISVIRKNDPDNIIIVGTGTWSQDVNDAADDQLKDANVMYA
LHFYAGTHGQFLRDKANYALSKGAPIFVTEWGTSDASGNGGVFLDQSREWLKYLDS
KTISWVNWNLSDKQESSSALKPGASKTGGWRLSDLSASGTFVRENILGTKDSTKDIP
ETPSKDKPTQENGISVQYRAGDGSMNSNQIRPQLQIKNNGNTTVDLKDVTARYWYK
AKNKGQNFDCDYAQIGCGNVTHKFVTLHKPKQGADTYLELGFKNGTLAPGASTGNI
QLRLHNDDWSNYAQSGDYSFFKSNTFKTTKKITLYDQGKLIWGTEPN

[0217] Endoglucanase A (EC 3.2.1.4) (Cellulase A) (Endo-1,4-beta-glucanase A) (EgA) Butyrivibrio fibrisolvens

MVSKKQKFLTVILVIVLAIVIVGGVFGISFVKGRVTFPWQLQNSEAKTEQVKEPAKEE
PKLVIKEKKQDESAKKEQELKKAKEEAEAAVEKETEKTEEEPVDNLLNDMKLKYYG
KLAVEGSHLVDADGHEVLLMGVSTHGINWYPEYASAETIKSLRDTWGINVIRLAMY
TSDYNGYCVAGKENQEKLKDIIDDAVEAATDNDMYVIIDWHTLNDADPNEYKADAI
QFFGEMVRKYKDNENVIYEICNEPNGDTTWNDVRRYANEVIPVIRNVDAIILVGTPK
WATDLDSVLDKPLDFDNIMYTYHFYAGTHHKAERNALRDALDEGLPVFISEYGLVD
ADGDGNLNEKEADYWYDMIRKEYGVSSCMWNLSNKDEGSAMINADCDKLSDFTE
EDLSESAMWLIDQISQLKHSDLEQGVDWITPENNNR

[0218] Cellodextrinase (EC 3.2.1.4) Butyrivibrio fibrisolvens

MKKVLVNQVGFLCNAPKKAVLNFQANEFSVVDGNGKKAFDGKVEHFGTDEISGED
TYVADFSALTEEGKYKIVADGQESVLFSISNDAYDKLMKDICKCFYYLRCGDALSKE
FAGEYYHKPCHMTKATVYGEDVEPVDVTGGWHDAGDYGRYSTAGAVAVAHLLY
GVRFFKGLLDVHYDIPKVAGDKGNLPEILAEVKVELDFLMKMQRENGSVWHKVTT
FNHAPFLMPEDDREELFLFSVSSLATADIAAVFALAYTVYKEYDAEYADKLMQKSLL
AYKWLLDNPDELLFFNPDGSNTGQYDEAEDISNRFWAACALYEATSDGKYYSDAQE
LKNRLEEFDKNAQKKGYQGNVFTCLGWAEVAGLGSLSLLLKREENALCSLARNSFV
AEADRLVKVSKENGFGLCMGENDFIWGSNMELLKYMMVLSTAIRIDNKPEYKLALE
AGLDYILGCNSMDISYVTGNGEKAFKNPHLRPTAVDDIEEPWPGLVSGGPNSGLHDE
RAQTLRGKGLPPMKCYIDHIDCYSLNEITIYWNSPLVFALSGILE

[0219] Endoglucanase A (EC 3.2.1.4) (Cellulase A) (Endo-1,4-beta-glucanase A) (EgA) Butyrivibrio fibrisolvens

MVSKKQKFLTVILVIVLAIVIVGGVFGISFVKGRVTFPWQLQNSEAKTEQVKEPAKEE
PKLVIKEKKQDESAKKEQELKKAKEEAEAAVEKETEKTEEEPVDNLLNDMKLKYYG
KLAVEGSHLVDADGHEVLLMGVSTHGINWYPEYASAETIKSLRDTWGINVIRLAMY
TSDYNGYCVAGKENQEKLKDIIDDAVEAATDNDMYVIIDWHTLNDADPNEYKADAI
QFFGEMVRKYKDNENVIYEICNEPNGDTTWNDVRRYANEVIPVIRNVDAIILVGTPK
WATDLDSVLDKPLDFDNIMYTYHFYAGTHHKAERNALRDALDEGLPVFISEYGLVD
ADGDGNLNEKEADYWYDMIRKEYGVSSCMWNLSNKDEGSAMINADCDKLSDFTE
EDLSESAMWLIDQISQLKHSDLEQGVDWITPENNNR

[0220] Endoglucanase (EC 3.2.1.4) Butyrivibrio proteoclasticus (strain ATCC 51982/DSM 14932/B316) (Clostridium proteoclasticum)

MHKSKCIKRVFTFLLALFVFVMAIPATKVSATGGTDRSATQVVSDMRVGWNIGNSL
DSFGQSYNFPYTSLNETYWGNPATTKALIDEVAKAGENTIRIPVSWGQYTSGSDYQIP
DFVMNRVKEVVDYCIVNDMYVILNSHHDINSDYCFYVPNNANKDRSEKYFKSIWTQ
IAKEFRNYDYHLVFETMNEPRLVGHGEEWWFPRNNPSNDIREAVACINDYNQVALD
AIRATGGNNATRCVMVPGYDASIEGCMTDGFKMPNDTASGRLILSVHAYIPYYFAL
ASDTYVTRFDDNLKYDIDSFFNDLNSKFLSRNIPVVVGETSATNRNNTAERVKWAD
YYWGRAARYSNVAMVLWDNNIYQNNSAGSDGECHMYIDRNSLQWKDPEIISTIMK
HVDGTPATINGKEIPSTEQPDPTPVDPDPTPVDPDPTPVDPDPTPVDPDPQPVDPTPVS
GALKAEYTINNWGSGYQVLIKVKNDSASRVDGWTLKISKSEVKIDSSWCVNIAEEG
GYYVITPMSWNSSLEPSASVDFGIQGSGSIGTSVNISVQ

[0221] Cellulase (EC 3.2.1.4)Caldicellulosiruptor saccharolyticus (strain ATCC 43494/DSM 8903/Tp8T 6331)

MKKECLRVFAVFMVFTFLLSLFPFVTFAQNTAYEKDKYPHLIGNSLVKKPSVAGRLQ
IIKQNGRRILADQNGEPIQLRGMSTHGLQWFPQIINNNAFAALANDWGCNVIRLAMY
IGEGGYATNPQVKDKVIEGIKLAIQNDMYVIVDWHVLNPGDPNAEIYKGAKDFFKEI
AQKFPNDFHIIYELCNEPNPTDPGVTNDEAGWKKVKAYAEPIIKMLRQMGNENIIIIG
SPNWSQRPDFAIKDPIADDKVMYSVHFYTGTHKVDGYVFENMKMAIEAGVPVFVTE
WGTSEASGDGGPYLDEADKWLEYLNANNISWVNWSLTNKNETSGAFVPYISGVSQ
ATDLDPGSDQKWDISELSISGEYVRSRIKGIPYQPIERTLKISQDQVACAPIGQPILPSD
FEDGTRQGWDWDGPSGVKGALTIEEANGSNALSWEVEYPEKKLQDGWASAPRLIL
RNINTTRGDCKYLCFDFYLKPKQATKGELAIFLAFAPPSLNYWAQAEDSFNIDLTNLS
TLKKTPDDLYSFKISFDLDKIKEGKIIGPDTHLRDIIIVVADVNSDFKGRMYLDNVRFT
NMLFEDVTPQTTGYEAISKLYSKKIVNGISTNLFGPEKAVTRAEVAAMAVRLLDLQE
ESYNGEFVDVSKNSWYANEVSTAYKAGIILGDGKYIKPEKAVTREEMAVFAMRIYRI
LTDEKAEATEEIAISDKNSISSWARQDVNAAISLGLMDVFTDGSFGPKVKVTRAEAT
QIIYKILELTGKM

[0222] Endoglucanase A (EC 3.2.1.4) (Cellulase A) (Endo-1,4-beta-glucanase A) Cellulomonas fimi

MSTRRTAAALLAAAAVAVGGLTALTTTAAQAAPGCRVDYAVTNQWPGGFGANVTI
TNLGDPVSSWKLDWTYTAGQRIQQLWNGTASTNGGQVSVTSLPWNGSIPTGGTASF
GFNGSWAGSNPTPASFSLNGTTCTGTVPTTSPTPTPTPTTPTPTPTPTPTPTPTVTPQPT
SGFYVDPTTQGYRAWQAASGTDKALLEKIALTPQAYWVGNWADASHAQAEVADY
TGRAVAAGKTPMLVVYAIPGRDCGSHSGGGVSESEYARWVDTVAQGIKGNPIVILEP
DALAQLGDCSGQGDRVGFLKYAAKSLTLKGARVYIDAGHAKWLSVDTPVNRLNQV
GFEYAVGFALNTSNYQTTADSKAYGQQISQRLGGKKFVIDTSRNGNGSNGEWCNPR
GRALGERPVAVNDGSGLDALLWVKLPGESDGACNGGPAAGQWWQEIALEMARNA
RW

[0223] Endoglucanase A (EC 3.2.1.4) (Cellulase A) (Endo-1,4-beta-glucanase A) Cellulomonas fimi

MSTRRTAAALLAAAAVAVGGLTALTTTAAQAAPGCRVDYAVTNQWPGGFGANVTI
TNLGDPVSSWKLDWTYTAGQRIQQLWNGTASTNGGQVSVTSLPWNGSIPTGGTASF
GFNGSWAGSNPTPASFSLNGTTCTGTVPTTSPTPTPTPTTPTPTPTPTPTPTPTVTPQPT
SGFYVDPTTQGYRAWQAASGTDKALLEKIALTPQAYWVGNWADASHAQAEVADY
TGRAVAAGKTPMLVVYAIPGRDCGSHSGGGVSESEYARWVDTVAQGIKGNPIVILEP
DALAQLGDCSGQGDRVGFLKYAAKSLTLKGARVYIDAGHAKWLSVDTPVNRLNQV
GFEYAVGFALNTSNYQTTADSKAYGQQISQRLGGKKFVIDTSRNGNGSNGEWCNPR
GRALGERPVAVNDGSGLDALLWVKLPGESDGACNGGPAAGQWWQEIALEMARNA
RW

[0224] Endoglucanase (EC 3.2.1.4) (Cellulase) (Endo-1,4-beta-glucanase) Cellulomonas uda

MPLRALVAVIVTTAVMLVPRAWAQTAWERYKARFMMPDARIIDTANGNVSHTEGQ
GFAMLLAVANNDRPAFDKLWQWTDSTLRDKSNGLFYWRYNPVAPDPIADKNNAT
DGDTLIAWALLRAQKQWQDKRYATASDAITASLLKYTVVTFAGRQVMLPGVKGFN
RNDHLNLNPSYFIFPAWRAFAERTHLTAWRTLQSDGQALLGQMGWGKSHLPSDWV
ALRADGKMLPAKEWPPRMSFDAIRIPLYISWVDPHSALLAPWKAWMQSYPRLQTPA
WINVSTNEVAPWNMAGGLLAVRDLTLGEPLERRRLTTRMIITPPASSCWSGWRNRIS
ASAVMALQVSQPVCLRAERKEQERLTM

[0225] Endoglucanase B (EGB) (EC 3.2.1.4) (Cellulase) (Endo-1,4-beta-glucanase) Cellvibrio japonicus (strain Ueda107) (Pseudomonas fluorescens subsp. cellulosa)

MNLLSGWVRPLMLGCGLLGAALSAGSIQAAVCEYRVTNEWGSGFTASIRITNNGSST
INGWSVSWNYTDGSRVTSSWNAGLSGANPYSATPVGWNTSIPIGSSVEFGVQGNNG
SSRAQVPAVTGAICGGQGSSAPSSVASSSSSSSVVSSTPRSSSSSVSSSVPGTSSSSSSSV
LTGAQACNWYGTLTPLCNNTSNGWGYEDGRSCVARTTCSAQPAPYGIVSTSSSTPLS
SSSSSRSSVASSSSLSSATSSSASSVSSVPPIDGGCNGYATRYWDCCKPHCGWSANVP
SLVSPLQSCSANNTRLSDVSVGSSCDGGGGYMCWDKIPFAVSPTLAYGYAATSSGD
VCGRCYQLQFTGSSYNAPGDPGSAALAGKTMIVQATNIGYDVSGGQFDILVPGGGV
GAFNACSAQWGVSNAELGAQYGGFLAACKQQLGYNASLSQYKSCVLNRCDSVFGS
RGLTQLQQGCTWFAEWFEAADNPSLKYKEVPCPAELTTRSGMNRSILNDIRNTCP

[0226] Endoglucanase C (EC 3.2.1.4) (Cellodextrinase C) (Cellulase C) (Endo-1,4-beta-glucanase C) (EGC) Cellvibrio japonicus (strain Ueda107) (Pseudomonas fluorescens subsp. cellulosa)

MGHVTSPSKRYPASFKRAGSILGVSIALAAFSNVAAAGCEYVVTNSWGSGFTAAIRIT
NSTSSVINGWNVSWQYNSNRVTNLWNANLSGSNPYSASNLSWNGTIQPGQTVEFGF
QGVTNSGTVESPTVNGAACTGGTSSSVSSSSVVSSSSSSRSSVSSSSVVSSSSSVVSSSS
SSVVSGGQCNWYGTLYPLCVSTTSGWGYENNRSCISPSTCSAQPAPYGIVGGSSSPSS
ISSSSVRSSSSSSVVPPSSSSSSSVPSSSSSSVSSSSVVSSSSSSVSVPGTGVFRVNTQGNL
TKDGQLLPARCGNWFGLEGRHEPSNDADNPSGAPMELYAGNMWWVNNSQGSGRT
IQQTMTELKQQGITMLRLPIAPQTLDANDPQGRSPNLKNHQSIRQSNARQALEDFIKL
ADQNDIQIFIDIHSCSNYVGWRAGRLDARPPYVDANRVGYDFTREEYSCSATNNPSS
VTRIHAYDKQKWLANLREIAGLSAKLGVSNLIGIDVFNEPYDYTWAEWKGMVEEAY
QAINEVNPNMLIIVEGISANANTQDGTPDTSVPVPHGSTDLNPNWGENLYEAGANPP
NIPKDRLLFSPHTYGPSVFVQRQFMDPAQTECAGLEGDEAAQARCRIVINPTVLEQG
WEEHFGYLRELGYGILIGEFGGNMDWPGAKSSQADRNAWSHITTNVDQQWQQAAA
SYFKRKGINACYWSMNPESADTMGWYLTPWDPVTANDMWGQWTGFDPRKTQLLH
NMWGL

[0227] Cellulase, putative, cel5D (EC 3.2.1.4) Cellvibrio japonicus (strain Ueda107) (Pseudomonas fluorescens subsp. cellulosa)

MPHRGQGCIRNWLLTIKPRSIMNRINTLVFSCLLVVLAGCGSAGGGSSGGASSSIITPS
SSDTSSLSSSASSTSSLSSASSLSSSSSSSSSLSSAGLYPSYNTSPAAPDSTGMQSTAVQL
AGKIRLGWNIGNTMEAIGGETAWGNPMVSNELLKLVKDSGFDAVRIPVAWDQYAN
QESAEISAAWLNRVKQVVQMAIDNELYVLINIHWDGGWLENNITPAKKDENNAKQ
KAFWEQIATHLRDFDEHLLFAGTNEPNAENAEQMDVLNSYLQTFVDAVRSTGGKN
AYRVLVLQGPVTDIEKTNELWTHMPADTATDRLMAEVHFYTPYNFALMRQDESWG
KQFYYWGEGFLSTTDTERNPTWGEEATIDQLFDLMKTKFVDQGIPVVLGEFSAMRR
TNLTGDALTLHLAGRAYYHKYVTQQALARGLLPFYWDNGGNDNFSSGIFNRQQNT
VFDQQVLDALLEGAGAQ

[0228] Endoglucanase B (EGB) (EC 3.2.1.4) (Cellulase) (Endo-1,4-beta-glucanase) Cellvibrio japonicus (strain Ueda107) (Pseudomonas fluorescens subsp. cellulosa)

MNLLSGWVRPLMLGCGLLGAALSAGSIQAAVCEYRVTNEWGSGFTASIRITNNGSST
INGWSVSWNYTDGSRVTSSWNAGLSGANPYSATPVGWNTSIPIGSSVEFGVQGNNG
SSRAQVPAVTGAICGGQGSSAPSSVASSSSSSSVVSSTPRSSSSSVSSSVPGTSSSSSSSV
LTGAQACNWYGTLTPLCNNTSNGWGYEDGRSCVARTTCSAQPAPYGIVSTSSSTPLS
SSSSSRSSVASSSSLSSATSSSASSVSSVPPIDGGCNGYATRYWDCCKPHCGWSANVP
SLVSPLQSCSANNTRLSDVSVGSSCDGGGGYMCWDKIPFAVSPTLAYGYAATSSGD
VCGRCYQLQFTGSSYNAPGDPGSAALAGKTMIVQATNIGYDVSGGQFDILVPGGGV
GAFNACSAQWGVSNAELGAQYGGFLAACKQQLGYNASLSQYKSCVLNRCDSVFGS
RGLTQLQQGCTWFAEWFEAADNPSLKYKEVPCPAELTTRSGMNRSILNDIRNTCP

[0229] Cellulase (EC 3.2.1.4)Clavibacter michiganensis

MRKASVEVVFSAAGWLPYDPYMTFRQVRASLVLRLVLLLALVVGTTSAAFAAPVS
AATVAGPVAAASSPGWLHTAGGKIVTASGAPYTIRGIAWFGMETSSCAPHGLDTITL
AGGMQHIKQMGFTTVRLPFSNQCLAASGVTGVSADPSLAGLTPLQVMDHVVASAK
SAGLDVILDQHRPDSGGQSELWYTSQYPESRWISDWRMLAKRYAAEPTVIGVDLHN
EPHGAATWGTGAATTDWRAAAERGGNAVLAENPNLLVLVEGIDHEADGSGTWWG
GALGLVGNAPVRLSVANRVVYSPHDYPSTIYGQSWFSASNYPANLPGIWDAHWGYL
AKKDIAPVLVGEFGTKFETTSDKQWLNTLVGYLSSTGISSSFWAFNPNSGDTGGIVKS
DWVTPEQAKLDALAPILHPSPGSGPGSGGSGSQPAPQPDPANPGAVSAKWQPGSSW
ASGYVANIDVTATAAVTGWTVSWASPGTTRVVNSWGMRCSVASGTVSCTGTDWA
SKLAAGQTVHVGLQASGGPAPSSPRLTATAAAVPPAQPTPPARPTTHGRATHYSLGQ
GNTIANGNCSMPAVPADRMYVAVSSPEYSGAAACGTFLDVTGPKGTVRVQVADQC
HGCEVGHLDLSEEAFRALGDFNAGIIPISYVTVRDPAGPTVAIRVKEGSSRWWAGLQ
VLNAGNRIDRVEIQAGRQWLPLTRTDYGYWVTPSPIQDGPLTVKVTDQYGRAVVLP
GLRMAPGEIQRTASRFYPV

[0230] Cellulase (EC 3.2.1.4)Clavibacter michiganensis subsp. michiganensis (strain NCPPB 382)

MRKASVEVVFSAAGWLPYDPYMTFRQVRASLVLRLVLLLALVVGTTSAAFAAPVS
AATVAGPVAAASSPGWLHTAGGKIVTASGAPYTIRGIAWFGMETSSCAPHGLDTITL
AGGMQHIKQMGFTTVRLPFSNQCLAASGVTGVSADPSLAGLTPLQVMDHVVASAK
SAGLDVILDQHRPDSGGQSELWYTSQYPESRWISDWRMLAKRYAAEPTVIGVDLHN
EPHGAATWGTGAATTDWRAAAERGGNAVLAENPNLLVLVEGIDHEADGSGTWWG
GALGLVGNAPVRLSVANRVVYSPHDYPSTIYGQSWFSASNYPANLPGIWDAHWGYL
AKKDIAPVLVGEFGTKFETTSDKQWLNTLVGYLSSTGISSSFWAFNPNSGDTGGIVKS
DWVTPEQAKLDALAPILHPSPGSGPGSGGSGSQPAPQPDPANPGAVSAKWQPGSSW
ASGYVANIDVTATAAVTGWTVSWASPGTTRVVNSWGMRCSVASGTVSCTGTDWA
SKLAAGQTVHVGLQASGGPAPSSPRLTATAAAVPPAQPTPPARPTTHGRATHYSLGQ
GNTIANGNCSMPAVPADRMYVAVSSPEYSGAAACGTFLDVTGPKGTVRVQVADQC
HGCEVGHLDLSEEAFRALGDFNAGIIPISYVTVRDPAGPTVAIRVKEGSSRWWAGLQ
VLNAGNRIDRVEIQAGRQWLPLTRTDYGYWVTPSPIQDGPLTVKVTDQYGRAVVLP
GLRMAPGEIQRTASRFYPVH

[0231] Endo-1,4-beta glucanase EngF (EC 3.2.1.4) Clostridium cellulovorans

MFNNVKKKILSIVAAGAMLMALVPNINVAAETTYSNLTGNANVKKPSVGGKLQLLN
KNGIKTLCDKDGNPIQLRGMSTHGLQWFPGVVNNNAFAALSNDWNSNVIRLAMYV
AEGGYATNPSVKQTVINGINYAIANDMYVIVDWHMMNPGDPNASVYSGAQSFENDI
STLYPNNKNIIYELCNEPNGENGGVTNDATGWAQVKSYATPIVQLLRNKGNENLIIV
GNPFWSQRPDLAADNPINDSNTMYSVHFYSGTNPISTVDTNRDNAMSNVRYALNHG
AAVFATEWGTSLATGTTGPYLAKADAWLDFLNGNNISWCNFSISNKDEKAAALNSL
TSLDPGSDKLWADNELTTSGQYVRARIKGAYYATPVDPVTNQPTAPKDFSSGFWDF
NDGTTQGFGVNPDSPITAINVENANNALKISNLNSKGSNDLSEGNFWANVRISADIW
GQSINIYGDTKLTMDVIAPTPVNVSIAAIPQSSTHGWGNPTRAIRVWTNNFVAQTDGT
YKATLTISTNDSPNFNTIATDAADSVVTNMILFVGSNSDNISLDNIKFTK

[0232] Endoglucanase D (EC 3.2.1.4) (Cellulase D) (Endo-1,4-beta-glucanase D) Clostridium cellulovorans (strain ATCC 35296/DSM 3052/OCM 3/743B)

MIKHLLSRGKLLLFVSVMATSSIIAGGNAYGSTAFTGVRDVPAQQIVNEMKVGWNL
GNTMDAIGGETNWGNPMTTHAMINKIKEAGFNTLRLPVTWDGHMGAAPEYTIDQT
WMKRVEEIANYAFDNDMYVIINLHHENEWLKPFYANEAQVKAQLTKVWTQIANNF
KKYGDHLIFETMNEPRPVGASNEWTGGSYENREVVNRYNLTAVNAIRATGGNNAT
RYIMVPTLAASAMSTTINDLVIPNNDSKVIVSLHMYSPYFFAMDINGTSSWGSDYDK
SSLDSEFDAVYNKFVKNGRAVVIGEMGSINKNNTAARVTHAEYYAKSAKARGLTPI
WWDNGYSVAGKAETFGIFNRSNLTWDAPEVMKAFIKGIGGSSTTTPTTPTTPTTPTTP
TTPTTPTTPTTPTTPQSAVEVTYAITNSWGSGASVNVTIKNNGTTPINGWTLKWTMPI
NQTITNMWSASFVASGTTLSVTNAGYNGTIAANGGTQSFGFNINYSGVLSKPTGFTV
NGTECTVK

[0233] Endoglucanase D (EC 3.2.1.4) (Cellulase D) (Endo-1,4-beta-glucanase D) Clostridium cellulovorans (strain ATCC 35296/DSM 3052/OCM 3/743B)

MIKHLLSRGKLLLFVSVMATSSIIAGGNAYGSTAFTGVRDVPAQQIVNEMKVGWNL
GNTMDAIGGETNWGNPMTTHAMINKIKEAGFNTLRLPVTWDGHMGAAPEYTIDQT
WMKRVEEIANYAFDNDMYVIINLHHENEWLKPFYANEAQVKAQLTKVWTQIANNF
KKYGDHLIFETMNEPRPVGASNEWTGGSYENREVVNRYNLTAVNAIRATGGNNAT
RYIMVPTLAASAMSTTINDLVIPNNDSKVIVSLHMYSPYFFAMDINGTSSWGSDYDK
SSLDSEFDAVYNKFVKNGRAVVIGEMGSINKNNTAARVTHAEYYAKSAKARGLTPI
WWDNGYSVAGKAETFGIFNRSNLTWDAPEVMKAFIKGIGGSSTTTPTTPTTPTTPTTP
TTPTTPTTPTTPTTPQSAVEVTYAITNSWGSGASVNVTIKNNGTTPINGWTLKWTMPI
NQTITNMWSASFVASGTTLSVTNAGYNGTIAANGGTQSFGFNINYSGVLSKPTGFTV
NGTECTVK

[0234] Endoglucanase A (EC 3.2.1.4) (Cellulase A) (Endo-1,4-beta-glucanase A) Clostridium longisporum

MKRSLLKTCSIIAGATIIFSSLSISRNPLEVQAASMRSASEIVQEMGVGWNLGNTLDA
KITNLSYNTSPISFETGWGNPVTTKAMIDKIKNAGFKTIRIPTTWGEHLDGNNKLNEE
WVKRVKEVVDYCIADDLYVILNTHHEGNWVIPTYAKESSVTPKLKTLWTQISEAFK
DYDDHLIFETLNEPRLEGTPYEWTGGTSESRDVVNKYNAAALESIRKTGGNNLSRAV
MMPTYAASGSSTTMNDFKVPDDKNVIASVHAYSPYFFAMDTSSNSVNTWGSSYDK
YSLDVELDSYLNTFKSKGVPVVIGEFGSINKNNTSSRAELAEYYVTAAQKRGIPCVW
WDNNYAETNKGETFGLLNRSTLNWYFSDIKDALIRGYKNVHPEATEDDKPSTDVTN
PDSGNTKPDSGNTNPGTETTTPTDNEKISITSKINDWGGAYQADFTLKNNTSSDINNW
SFKIKKNDIVFTNYWDVKITEENGYYVVTPQAWKTTILANSSIVISIQGTGKVISNFEY
KFD

[0235] Endoglucanase A (EC 3.2.1.4) (Cellulase A) (Endo-1,4-beta-glucanase A) Clostridium longisporum

MKRSLLKTCSIIAGATIIFSSLSISRNPLEVQAASMRSASEIVQEMGVGWNLGNTLDA
KITNLSYNTSPISFETGWGNPVTTKAMIDKIKNAGFKTIRIPTTWGEHLDGNNKLNEE
WVKRVKEVVDYCIADDLYVILNTHHEGNWVIPTYAKESSVTPKLKTLWTQISEAFK
DYDDHLIFETLNEPRLEGTPYEWTGGTSESRDVVNKYNAAALESIRKTGGNNLSRAV
MMPTYAASGSSTTMNDFKVPDDKNVIASVHAYSPYFFAMDTSSNSVNTWGSSYDK
YSLDVELDSYLNTFKSKGVPVVIGEFGSINKNNTSSRAELAEYYVTAAQKRGIPCVW
WDNNYAETNKGETFGLLNRSTLNWYFSDIKDALIRGYKNVHPEATEDDKPSTDVTN
PDSGNTKPDSGNTNPGTETTTPTDNEKISITSKINDWGGAYQADFTLKNNTSSDINNW
SFKIKKNDIVFTNYWDVKITEENGYYVVTPQAWKTTILANSSIVISIQGTGKVISNFEY
KFD

[0236] Endoglucanase (EC 3.2.1.4) Clostridium sp

MRKRGLAVVVALVLAATPVMGTLQSNLVVKADQQTNTNLLANGNFNSGLSDWDY
FTAEGGKGSVASSNGKLVATVSENGTENYSMQVYHEGFQMYKGGVYELSFEISSSV
ARDVDYRIQLNGGDYRGYYDGRVKTNSTTQKVDVKFTMKEENDIVPRLCFNIGNCG
ASLPSHQVTLDNVELKLLDGSQINYTSNEKKEQDININQVGYRTADQKQAIFRGSNV
GKSFSVVNTATNKTVYTGTVSASKNSSIANETNYIGDFSSVTAPGTYKITATGLADSY
EFTISDDVYTDAFTDLMRFFYLQRCEEIPSSLGGDFAHGECHTTKARILGTNEYIDTTG
GWHDAGDYGRYVVATSKAVTDILLAYQDNKDIFTDNTNIPESGNGQADVLDELKG
QFEWMLKMQNKNNGGVYHKVTCADFPSYVSADKEKAELIVCPISITATADFAACM
ALSYDTYKTTDATFAKTCLDAAKKAWSYLSTNSSGGFTNPSGINTGEYGDRNDSDE
RYFAAAALYYATGESTYHEAFKNMVNQGVKVGSDWATVGEYGNVLYLKSKNQDA
STKSKIESKILSEASDFLRVSQNEPYGISTGNNFIWGSNMVVADNAKLLMDAYNISGK
SEYKTAAIEHVNYIFGKNPMGMSYVTGYGTVSPKNPHHRPSMVAGKAIKGAMVGG
PDSALEDSIAKAYVSNAAPAKCYVDHSESYSTNEVDIYWNSAIVIALAQTGLVGKAS
QSTVPSTEPSVKPSETPSTEPSIVPSETPSTEPSVVPSETPSTEPSTVPSVKPSQPAGNTN
GIKVTHTVSGSDSTNQVYQIQNSGSSAIDLSKLVITYKFTKNDSKNMVLWCDNAAAQ
LNVAPYYASISSGVKTSVTKSGSEFTVKISFAEAFSLAPNAGYVQLQTRLTNEDWSSV
SGLKETGMQVTYGGTEI

[0237] Endoglucanase C307 (EC 3.2.1.4) (Cellulase C307) (Endo-1,4-beta-glucanase C307) Clostridium sp. (strain F1)

MVSFKAGINLGGWISQYQVFSKEHFDTFITEKDIETIAEAGFDHVRLPFDYPIIESDDN
VGEYKEDGLSYIDRCLEWCKKYNLGLVLDMHHAPGYRFQDFKTSTLFEDPNQQKRF
VDIWRFLAKRYINEREHIAFELLNEVVEPDSTRWNKLMLECVKAIREIDSTRWLYIGG
NNYNSPDELKNLADIDDDYIVYNFHFYNPFFFTHQKAHWSESAMAYNRTVKYPGQY
EGIEEFVKNNPKYSFMMELNNLKLNKELLRKDLKPAIEFREKKKCKLYCGEFGVIAI
ADLESRIKWHEDYISLLEEYDIGGAVWNYKKMDFEIYNEDRKPVSQELVNILARRKT

[0238] cellulase (EC 3.2.1.4) Cupriavidus necator (strain ATCC 43291/DSM 13513/CCUG 52238/LMG 8453/N-1) (Ralstonia eutropha)

MLRTRILHMIRPAPLLVAVTAHCLPPRGWRHGATGADMRRTLTGLTRWLLAGALA
CASLAAPAASAPVCKWADWDAFRQTLLSADGRVIDASTENQATVSEGQAYGLLFAL
AANDRASFDKLLAWTENNLAQGDLIAHLPAWIWGRLPPEQARSAGKAADSWGVID
ANPASDADLWLAYTLLEAGRLWQERRFTALGTLMARRILREETAVLPGLGRTVLPG
TQGFKLSERRWRLNPSYVPMQVMRRLATLLPDEPAWQQLVASSARLMLDTAPRGFS
PDWVEYETGRGFLPDAQTQAESAYNAIRVYLWAGMLASDAPQRAALLRAFTPLAD
YVAAKGFPPERVDTQTGQPGYYTQVLTLFGLGYLDGQFRFARDGALVPAWETGCP
AR

[0239] Endoglucanase Z (EC 3.2.1.4) (Cellulase Z) (Endo-1,4-beta-glucanase Z) (EGZ) Dickeya dadantii (strain 3937) (Erwinia chrysanthemi (strain 3937))

MPLSYLDKNPVIDSKKHALRKKLFLSCAYFGLSLACLSSNAWASVEPLSVNGNKIYA
GEKAKSFAGNSLFWSNNGWGGEKFYTADTVASLKKDWKSSIVRAAMGVQESGGYL
QDPAGNKAKVERVVDAAIANDMYAIIGWHSHSAENNRSEAIRFFQEMARKYGNKP
NVIYEIYNEPLQVSWSNTIKPYAEAVISAIRAIDPDNLIIVGTPSWSQNVDEASRDPINA
KNIAYTLHFYAGTHGESLRNKARQALNNGIALFVTEWGTVNADGNGGVNQTETDA
WVTFMRDNNISNANWALNDKNEGASTYYPDSKNLTESGKKVKSIIQSWPYKAGSA
ASATTDPSTDTTTDTTVDEPTTTDTPATADCANANVYPNWVSKDWAGGQPTHNEA
GQSIVYKGNLYTANWYTASVPGSDSSWTQVGSCN

[0240] Minor endoglucanase Y (EC 3.2.1.4) (Cellulase Y) (Endo-1,4-beta-glucanase Y) (EGY) Dickeya dadantii (strain 3937) (Erwinia chrysanthemi (strain 3937))

MGKPMWRCWALMLMVWFSASATAANGWEIYKSRFMTTDGRIQDTGNKNVSHTEG
QGFAMLMAVHYDDRIAFDNLWNWTQSHLRNTTSGLFYWRYDPSAANPVVDKNNA
SDGDVLIAWALLKAGNKWQDNRYLQASDSIQKAIIASNIIQFAGRTVMLPGAYGENK
NSYVILNPSYFLFPAWRDFANRSHLQVWRQLIDDSLSLVGEMRFGQVGLPTDWAAL
NADGSMAPATAWPSRFSYDAIRIPLYLYWYDAKTTALVPFQLYWRNYPRLTTPAWV
DVLSSNTATYNMQGGLLAVRDLTMGNLDGLSDLPGASEDYYSSSLRLLVMLARGK

[0241] Endoglucanase Z (EC 3.2.1.4) (Cellulase Z) (Endo-1,4-beta-glucanase Z) (EGZ) Dickeya dadantii (strain 3937) (Erwinia chrysanthemi (strain 3937))

MPLSYLDKNPVIDSKKHALRKKLFLSCAYFGLSLACLSSNAWASVEPLSVNGNKIYA
GEKAKSFAGNSLFWSNNGWGGEKFYTADTVASLKKDWKSSIVRAAMGVQESGGYL
QDPAGNKAKVERVVDAAIANDMYAIIGWHSHSAENNRSEAIRFFQEMARKYGNKP
NVIYEIYNEPLQVSWSNTIKPYAEAVISAIRAIDPDNLIIVGTPSWSQNVDEASRDPINA
KNIAYTLHFYAGTHGESLRNKARQALNNGIALFVTEWGTVNADGNGGVNQTETDA
WVTFMRDNNISNANWALNDKNEGASTYYPDSKNLTESGKKVKSIIQSWPYKAGSA
ASATTDPSTDTTTDTTVDEPTTTDTPATADCANANVYPNWVSKDWAGGQPTHNEA
GQSIVYKGNLYTANWYTASVPGSDSSWTQVGSCN

[0242] Glucanase (EC 3.2.1.→Enterobacter sp. CJF-002

MKALRWVVMALVLAAMNVRAACTWPAWEHFKRAYISDGGRVIDPSDARKITTSEG
QSYALFFALAADDRPMFDNVLEWTKDNLAQGDPGEHLPAWLWGKKDENNWTVLD
SNSASDADIWIAWSLLEAGRLWKEARYTTLGNALLNRIAKEEVVTVPGLGPMLLPG
KVGFAEETVWRLNPSYLPPQIARYLTRFGEPWTTLQETNHRLLLETAPKGFSPDWVR
YEKSKGWQLAPDKTLISGYDAIRVYLWVGMMNDHDAQKASLLERLKPMAALTAK
KGVVPEKVDVATAQPRGDGPVGFAAALLPFLQDRDAQAVQRQKVADHFPGDDAYF
SYVLTLFGQGWDEHRFRFTPRGELQPDWGQACASSQ

[0243] Endoglucanase (EC 3.2.1.4) (Carboxymethylcellulase) (CMCase) (Cellulase) (Endo-1,4-beta-glucanase) Escherichia coli (strain K12)

MNVLRSGIVTMLLLAAFSVQAACTWPAWEQFKKDYISQEGRVIDPSDARKITTSEGQ
SYGMFSALAANDRAAFDNILDWTQNNLAQGSLKERLPAWLWGKKENSKWEVLDS
NSASDGDVWMAWSLLEAGRLWKEQRYTDIGSALLKRIAREEVVTVPGLGSMLLPG
KVGFAEDNSWRFNPSYLPPTLAQYFTRFGAPWTTLRETNQRLLLETAPKGFSPDWVR
YEKDKGWQLKAEKTLISSYDAIRVYMWVGMMPDSDPQKARMLNRFKPMATFTEK
NGYPPEKVDVATGKAQGKGPVGFSAAMLPFLQNRDAQAVQRQRVADNFPGSDAY
YNYVLTLFGQGWDQHRFRFSTKGELLPDWGQECANSH

[0244] Endoglucanase (EC 3.2.1.4) (Carboxymethylcellulase) (CMCase) (Cellulase) (Endo-1,4-beta-glucanase) Escherichia coli (strain K12)

MNVLRSGIVTMLLLAAFSVQAACTWPAWEQFKKDYISQEGRVIDPSDARKITTSEGQ
SYGMFSALAANDRAAFDNILDWTQNNLAQGSLKERLPAWLWGKKENSKWEVLDS
NSASDGDVWMAWSLLEAGRLWKEQRYTDIGSALLKRIAREEVVTVPGLGSMLLPG
KVGFAEDNSWRFNPSYLPPTLAQYFTRFGAPWTTLRETNQRLLLETAPKGFSPDWVR
YEKDKGWQLKAEKTLISSYDAIRVYMWVGMMPDSDPQKARMLNRFKPMATFTEK
NGYPPEKVDVATGKAQGKGPVGFSAAMLPFLQNRDAQAVQRQRVADNFPGSDAY
YNYVLTLFGQGWDQHRFRFSTKGELLPDWGQECANSH

[0245] Endoglucanase A (EC 3.2.1.4) (Cellulase) (Endo-1,4-beta-glucanase) Fibrobacter succinogenes (Bacteroides succinogenes)

MNCRKYLLSGLAVFGLAATSAVAALSTDDYVEAAWMTTRFFGAQRSGQGPNWILD
GTSNPTSFTKDSYNGKDVSGGWFDCGDHVMYGQSQGYASYVLALAYAEFTEVSTT
FILVTTPTTRKPTTTPMKSGKPNKVRDLLEELRYEADFWVKAAIDGNNFVTVKGDG
NADHQKWVTAGAMSKLGSGEGGEPRCITGNANDGFTSGLAAAMLAVMARVDPDT
ANQAKYLKAAKTAYSYAKSHKGVTNSQGFYESSWWDGRWEDGPFLAELELYRTT
GENSYKTAAIDRYDNLKFSLGEGTHFMYSNVVPLSAVMAEAVFEETPHGMRKEAIG
VLDLIYEEKAKDKIFQNPNGMGSGKFPVRVPSGGAFLYALSDKFNNTNEHMEMIEK
NVSYLLGDNGSKKSYVVGFSKNGANAPSRPHHRGYYANEKRWRRSRRCSESSRKE
QALGRYDCWRLY

[0246] Endoglucanase A (EC 3.2.1.4) (Cellulase) (Endo-1,4-beta-glucanase) Fibrobacter succinogenes (Bacteroides succinogenes)

MNCRKYLLSGLAVFGLAATSAVAALSTDDYVEAAWMTTRFFGAQRSGQGPNWILD
GTSNPTSFTKDSYNGKDVSGGWFDCGDHVMYGQSQGYASYVLALAYAEFTEVSTT
FILVTTPTTRKPTTTPMKSGKPNKVRDLLEELRYEADFWVKAAIDGNNFVTVKGDG
NADHQKWVTAGAMSKLGSGEGGEPRCITGNANDGFTSGLAAAMLAVMARVDPDT
ANQAKYLKAAKTAYSYAKSHKGVTNSQGFYESSWWDGRWEDGPFLAELELYRTT
GENSYKTAAIDRYDNLKFSLGEGTHFMYSNVVPLSAVMAEAVFEETPHGMRKEAIG
VLDLIYEEKAKDKIFQNPNGMGSGKFPVRVPSGGAFLYALSDKFNNTNEHMEMIEK
NVSYLLGDNGSKKSYVVGFSKNGANAPSRPHHRGYYANEKRWRRSRRCSESSRKE
QALGRYDCWRLY

[0247] Endoglucanase 3 (EC 3.2.1.4) (Cellulase 3) (Endo-1,4-beta-glucanase 3) (EG3) Fibrobacter succinogenes (strain ATCC 19169/S85)

MQLKNFYPKMSVLGIATVMALTACGDENTQALFANNPVPGAENQVPVSSSDMSPTS
SDAVIDPTSSSAAVVDPSTLPAEGPITMPEGLGTLVDDFEDGDNLSKIGDYWYTYND
NDNGGASIITTPLNEEENIIPGRVNNGSNYALQVNYTLDRGDYEYDPYVGWGVQVA
PDEANGHFGGLTYWYKGGAHEVHIEITDVEDYDVHLAKFPASRTWKQAVVRFKDL
VQGGWGKEIPFDAKHIMAISFQAKGNKSKLVTDSLFIDNIYLQDSSEVEKDQPDMEIK
DPVIPVVEFTEAEITVTNPLQEKAMKYLNKGVNFTNWLENADGKFKSFELGESDVKI
LADNGFKSLRLPIDLDLYATNRDAFIAGTDTELKFDDDTLFLVLDSFVEWTAKYNMS
FVIDYHEYDNSYNTTSAKDPNYIKMMAETWKHVAAHYAESPREDLFFELLNEPDMS
DGKVTAATWTTAAQAMIDAIRTVDTKHTILFGDAQWYSITLLAKRTPFTDDNIIYVIH
TYEPFAFTHQGGSWTDYATIHDIPFPYDPAKWSTVSGDFGVNKSTKSYVKTNIKNYY
KTGSKEAILEQILKAKKWAATNNVPVIINEFGALNLRSTAESRLNYLTAMREICDTLQ
IPWTHWGYTGNFSVIENGKLIEGLDKALGVGSK

[0248] Endoglucanase type C (EC 3.2.1.4) (Cellulase) (Endo-1,4-beta-glucanase) (Endoglucanase I) (EG I) Fusarium oxysporum (Fusarium vascular wilt)

MKSLSLILSALAVQVAVAQTPDKAKEQHPKLETYRCTKASGCKKQTNYIVADAGIH
GIRQKNGAGCGDWGQKPNATACPDEASCAKNCILSGMDSNAYKNAGITTSGNKLRL
QQLINNQLVSPRVYLLEENKKKYEMLHLTGTEFSFDVEMEKLPCGMNGALYLSEMP
QDGGKSTSRNSKAGAYYGAGYCDAQCYVTPFINGVGNIKGQGVCCNELDIWEANS
RATHIAPHPCSKPGLYGCTGDECGSSGICDKAGCGWNHNRINVTDFYGRGKQYKVD
STRKFTVTSQFVANKQGDLIELHRHYIQDNKVIESAVVNISGPPKINFINDKYCAATG
ANEYMRLGGTKQMGDAMSRGMVLAMSVWWSEGDFMAWLDQGVAGPCDATEGD
PKNIVKVQPNPEVTFSNIRIGEIGSTSSVKAPAYPGPHRL

[0249] Cellulase (EC 3.2.1.4)Geobacillus sp. 70PC53

MKKAFLPVFIFLLVLTYFDKEGNAMERTPVEENGRLQVVGTALLNQHNKPFQLRGIS
THGLQWFGQFANKDAFQTLRDDWKANVVRLAMYTDPNANGYIAQPEWLKAKVKE
GVQAALDLGMYVIIDWHILNDNDPNLYKEQAKRFFAEMAREYGKYPNVIYEIANEP
NGNDVTWEEKIRPYADEVIRTIRSIDRDNLIIVGTGTWSQDVDDVASDPLPYKNIMYA
VHFYSGTHTQWLRDRVDAALQAGTPVFVSEWGTSDASGDGGPYLEEAEKWIEFLNE
RGISWVNWSLCDKNEASAALRPGADPHGGWGDDHLSDSGRFIKAKLIEAAQQSGQK
AKGAANPHQRNGNDSSDGGKTGHASGHPFFWTFILAAGVAFGFGGLALGKRLFKE

[0250] Endoglucanase (EC 3.2.1.4) (Alkaline cellulase) (Endo-1,4-beta-glucanase) Halalkalibacter akibai (strain ATCC 43226/DSM 21942/CIP 109018/JCM 9157/1139) (Bacillus akibai)

MMLRKKTKQLISSILILVLLLSLFPTALAAEGNTREDNFKHLLGNDNVKRPSEAGALQ
LQEVDGQMTLVDQHGEKIQLRGMSTHGLQWFPEILNDNAYKALANDWESNMIRLA
MYVGENGYASNPELIKSRVIKGIDLAIENDMYVIVDWHVHAPGDPRDPVYAGAEDF
FRDIAALYPNNPHIIYELANEPSSNNNGGAGIPNNEEGWNAVKEYADPIVEMLRDSG
NADDNIIIVGSPNWSQRPDLAADNPIDDHHTMYTVHFYTGSHAASTESYPPETPNSER
GNVMSNTRYALENGVAVFATEWGTSQANGDGGPYFDEADVWIEFLNENNISWAN
WSLTNKNEVSGAFTPFELGKSNATSLDPGPDQVWVPEELSLSGEYVRARIKGVNYEP
IDRTKYTKVLWDFNDGTKQGFGVNGDSPVEDVVIENEAGALKLSGLDASNDVSEGN
YWANARLSADGWGKSVDILGAEKLTMDVIVDEPTTVSIAAIPQGPSANWVNPNRAI
KVEPTNFVPLEDKFKAELTITSADSPSLEAIAMHAENNNINNIILFVGTEGADVIYLDN
IKVIGTEVEIPVVHDPKGEAVLPSVFEDGTRQGWDWAGESGVKTALTIEEANGSNAL
SWEFGYPEVKPSDNWATAPRLDFWKSDLVRGENDYVTFDFYLDPVRATEGAMNIN
LVFQPPTNGYWVQAPKTYTINFDELEEPNQVNGLYHYEVKINVRDITNIQDDTLLRN
MMIIFADVESDFAGRVFVDNVRFEGAATTEPVEPEPVDPGEETPPVDEKEAKTEQKE
AEKEEKEE

[0251] Endoglucanase (EC 3.2.1.4) (Alkaline cellulase) (Endo-1,4-beta-glucanase) Halalkalibacter akibai (strain ATCC 43226/DSM 21942/CIP 109018/JCM 9157/1139) (Bacillus akibai)

MMLRKKTKQLISSILILVLLLSLFPTALAAEGNTREDNFKHLLGNDNVKRPSEAGALQ
LQEVDGQMTLVDQHGEKIQLRGMSTHGLQWFPEILNDNAYKALANDWESNMIRLA
MYVGENGYASNPELIKSRVIKGIDLAIENDMYVIVDWHVHAPGDPRDPVYAGAEDF
FRDIAALYPNNPHIIYELANEPSSNNNGGAGIPNNEEGWNAVKEYADPIVEMLRDSG
NADDNIIIVGSPNWSQRPDLAADNPIDDHHTMYTVHFYTGSHAASTESYPPETPNSER
GNVMSNTRYALENGVAVFATEWGTSQANGDGGPYFDEADVWIEFLNENNISWAN
WSLTNKNEVSGAFTPFELGKSNATSLDPGPDQVWVPEELSLSGEYVRARIKGVNYEP
IDRTKYTKVLWDFNDGTKQGFGVNGDSPVEDVVIENEAGALKLSGLDASNDVSEGN
YWANARLSADGWGKSVDILGAEKLTMDVIVDEPTTVSIAAIPQGPSANWVNPNRAI
KVEPTNFVPLEDKFKAELTITSADSPSLEAIAMHAENNNINNIILFVGTEGADVIYLDN
IKVIGTEVEIPVVHDPKGEAVLPSVFEDGTRQGWDWAGESGVKTALTIEEANGSNAL
SWEFGYPEVKPSDNWATAPRLDFWKSDLVRGENDYVTFDFYLDPVRATEGAMNIN
LVFQPPTNGYWVQAPKTYTINFDELEEPNQVNGLYHYEVKINVRDITNIQDDTLLRN
MMIIFADVESDFAGRVFVDNVRFEGAATTEPVEPEPVDPGEETPPVDEKEAKTEQKE
AEKEEKEE

[0252] Endoglucanase EG-1 (EC 3.2.1.4) (Cellulase) (Endo-1,4-beta-glucanase) Hypocrea jecorina (Trichoderma reesei)

MAPSVTLPLTTAILAIARLVAAQQPGTSTPEVHPKLTTYKCTKSGGCVAQDTSVVLD
WNYRWMHDANYNSCTVNGGVNTTLCPDEATCGKNCFIEGVDYAASGVTTSGSSLT
MNQYMPSSSGGYSSVSPRLYLLDSDGEYVMLKLNGQELSFDVDLSALPCGENGSLY
LSQMDENGGANQYNTAGANYGSGYCDAQCPVQTWRNGTLNTSHQGFCCNEMDIL
EGNSRANALTPHSCTATACDSAGCGFNPYGSGYKSYYGPGDTVDTSKTFTIITQFNT
DNGSPSGNLVSITRKYQQNGVDIPSAQPGGDTISSCPSASAYGGLATMGKALSSGMV
LVFSIWNDNSQYMNWLDSGNAGPCSSTEGNPSNILANNPNTHVVFSNIRWGDIGSTT
NSTAPPPPPASSTTFSTTRRSSTTSSSPSCTQTHWGQCGGIGYSGCKTCTSGTTCQYSN
DYYSQCL

[0253] Glucanase (EC 3.2.1.→Klebsiella variicola

MPLRALVAVIVTTAVMLVPRAWADTAWERYKARFMMPDGRIIDTANGNVSHTEGQ
GFAMLLAVANNDRPAFDKLWQWTDSTLRDKSNGLFYWRYNPVAPDPIADKNNASD
GDTLIAWALLRAQKQWQDKRYAIASDAITASLLKYTVVTFAGRQVMLPGVKGFNL
NDHLNLNPSYFIFPAWRAFAERTHLTAWRTLQTDGQALLGQMGWGKSHLPSDWVA
LRADGKMLPAKEWPPRMSFDAIRIPLYLSWADPQSALLAPWKAWMQSYPRLQTPA
WINVSTNEVAPWYMAGGLLAVRDLTLGEPQEAPQIDDKDDYYSASLKQLVWLAKQ
DQR

[0254] Cellulase (EC 3.2.1.4)Komagataeibacter sucrofermentans

MAVAGSFPMLSSGAEADDAIGINPQIAQQWAIFRDKYFHPNGRIIDTGNSGESHSEGQ
GYGMLFSAAAGDQAAFEVIWVWARTNLQHKDDALFSWRYLDGHKPPVADKNNAT
DGDLLIALALAWAGKRWKRADYIQDAMNIYGDVLKLMTKSVGPYTVLLPGAVGFL
TKDTVTLNLSYYVMPSLMQAFALTGDAKWTKVMGDGLQIIAKGRFGEWKLPPDWL
SINLHTNAFSIAKGWPPRFSYDAIRVPLYLSWAHMLTPELLADFSRFWNHYGASALP
GWVDLTNGARSPYNAPPGYLAVASCTGLASAGELPTLDHAPDYYSAALTMLAYIAR
NQGDGM

[0255] Endoglucanase (EC 3.2.1.4) Martelella endophytica

MPRMLAASAAIIATTLAPLSAQAAGCEMTLHGINLSGAEFGQPGDPYGQGYIYPSEST
IKAFADDGFNAVRLPFLWERLQPTLNGTLDATELSRIKDTVETLRDNGMVVILDVHN
YARYHGEMIGTPNVPVAAFADFWKRLSAVFANDDDVIFGLMNEPHDISAPAWLAA
ANAAIDAIRTIGAGNLVLVPGTAWTGAHSWSQTFYGPSNASVMAQVVDSSNNFAYE
VHQYTDDDFSGKNADCSKIDDAVSALNDFTSWLNANDVQGFLGEFGTTEQIQCLRG
LKQMVDVVQQNPRAWLGWAYWAGGDWWPKDSPMIIHSNPRDGGTQQLRTLQPVL
GSNTTRASCNTKS

[0256] Endoglucanase (EC 3.2.1.4) Martelella endophytica

MPRMLAASAAIIATTLAPLSAQAAGCEMTLHGINLSGAEFGQPGDPYGQGYIYPSEST
IKAFADDGFNAVRLPFLWERLQPTLNGTLDATELSRIKDTVETLRDNGMVVILDVHN
YARYHGEMIGTPNVPVAAFADFWKRLSAVFANDDDVIFGLMNEPHDISAPAWLAA
ANAAIDAIRTIGAGNLVLVPGTAWTGAHSWSQTFYGPSNASVMAQVVDSSNNFAYE
VHQYTDDDFSGKNADCSKIDDAVSALNDFTSWLNANDVQGFLGEFGTTEQIQCLRG
LKQMVDVVQQNPRAWLGWAYWAGGDWWPKDSPMIIHSNPRDGGTQQLRTLQPVL
GSNTTRASCNTKS

[0257] Endoglucanase H (EC 3.2.1.4) Meiothermus taiwanensis

MRFLAVSGLLLVLGPVGCQSTQLQTPAPDTGGIVELNRQLGRGVNLGNALEAPWEG
AWGVRLEEGFFELIREAGFKTIRLPVSWTHHAGRAAPYTIDPAFFSRVDWAVTQATR
RGLNIVVNVHHYDELNANPQAEEARYLSIWRQIAERYRNQPGSVYFELLNEPHGREN
DNPQLWNDLLAKALRVVRESNPSRAVIVGPVGWNSLWRLSELRLPDDPNLIVTFHY
YDPLEFTHQGAEWLNPVPPTGVVWRENQGAFAAGWQNWSWGSRVGFVGEALEIT
YQEGWAGFYLHSDAGVEGYDRLAFRTSAPVSLQVSCRRDAPAKAVTTSGGVETVV
NLSECGNPSRLTDLILQNNSPNARAAFRLERLELRGPGSPLALLTHQQNAIAQAMEFA
QRWAEQNRRPIFVGEFGAYEKGDLDSRVRWTGAVRSELEKRNFSWAYWEFAAGFG
IYDRTTRQWRTPLLKALVPEQP

[0258] Endoglucanase MaCel5A (EC 3.2.1.4) (Endo-beta-1,4-glucanase) Microbulbifer sp. (strain ALW1)

MKRILFTAGGCLFYLLLAVKAYAYDCSATPAYQDGVNYQSGDLVSNTGAAYRCNV
AGWCSTGGAYAPGTGWAWTEAWDELGSCDGGAGSSGSSSSSSSSSSSSSGSSSSSSG
SGSSSGGTSCDGIEAWQVASIYTEGNVVQQNGERYIANWWNQGQSPEDNSGAYEV
WSAAGSCSGAGSSSSSSGGTSSSGSSSSGVSSSGGSSGGDSPIARHGKLHVCGNGLCN
ADNVPVQLRGMSTHGLQWYGWGNCITGNSLDTLAEDWNADILRVSLYVQEGGYET
DPAGYTAQVSHIIDEVTARGMYVLVDWHQLDPGDPNANLDNARQFFTDIAQAHGD
KTNIIYDVANEPNNVSWDAIQRYAMEVIPVIRQYAPDAVVLVGTHGWASLGISDGGS
AQDIFNNPVTIDNIMYTFHFYAASHGQVYRDELRSALERGMPVFVTEWGSQTYTGD
DGNDFVSTQAYLDLLDQYQISWTNWNYSDDFRTGAVWNTGTCSADSWGVGNLKE
AGAWVRDKIRNR

[0259] Probable endoglucanase (EC 3.2.1.4) (Cellulase) (Endo-1,4-beta-glucanase) Novacetimonas hansenii (Komagataeibacter hansenii)

MSVMAAMGGAQVLSSTGAFADPAPDAVAQQWAIFRAKYLRPSGRVVDTGNGGES
HSEGQGYGMLFAASAGDLASFQSMWMWARTNLQHTNDKLFSWRFLKGHQPPVPD
KNNATDGDLLIALALGRAGKRFQRPDYIQDAMAIYGDVLNLMTMKAGPYVVLMPG
AVGFTKKDSVILNLSYYVMPSLLQAFDLTADPRWRQVMEDGIRLVSAGRFGQWRLP
PDWLAVNRATGALSIASGWPPRFSYDAIRVPLYFYWAHMLAPNVLADFTRFWNNFG
ANALPGWVDLTTGARSPYNAPPGYLAVAECTGLDSAGELPTLDHAPDYYSAALTLL
VYIARAEETIK

[0260] Probable endoglucanase (EC 3.2.1.4) (Cellulase) (Endo-1,4-beta-glucanase) Novacetimonas hansenii (Komagataeibacter hansenii)

MSVMAAMGGAQVLSSTGAFADPAPDAVAQQWAIFRAKYLRPSGRVVDTGNGGES
HSEGQGYGMLFAASAGDLASFQSMWMWARTNLQHTNDKLFSWRFLKGHQPPVPD
KNNATDGDLLIALALGRAGKRFQRPDYIQDAMAIYGDVLNLMTMKAGPYVVLMPG
AVGFTKKDSVILNLSYYVMPSLLQAFDLTADPRWRQVMEDGIRLVSAGRFGQWRLP
PDWLAVNRATGALSIASGWPPRFSYDAIRVPLYFYWAHMLAPNVLADFTRFWNNFG
ANALPGWVDLTTGARSPYNAPPGYLAVAECTGLDSAGELPTLDHAPDYYSAALTLL
VYIARAEETIK

[0261] cellulase (EC 3.2.1.4) Novosphingobium sp

MMNLNRRTFSIGMLLAMTAACNTGTQSHAEGRPFTGSLAGNWWPLYRQRFLAPEG
RIVDNGNGGISHSEGQGYGMVLAALAGDRASFAKMADWADRTLLRKDMALYSWR
YDPKLANPVSDPNNATDGDVLIAWALSIAAARWGNSAWRQRSAAVRADIRAKCVA
TRYGREILVPGIAGFVETNGITINPSYFIWSAMEAFAKLDGEAAWRGIINDADALLRL
SRFGAHGVPTDWVLVTGRDQVAPAPDKPPRFGFDAIRVPLYATMAGRTGLTDNIAA
YWRGCLAQGRPIPAWVDVMTGEEANYAVSEGGAAIVSRLLNTAAPSQLSNDYFAAS
LQMLAQARP

[0262] Protein names Organism Sequence

[0263] Endoglucanase A (EC 3.2.1.4) (Cellulase A) (Endo-1,4-beta-D-glucanase A) Paenibacillus barcinonensis

MTKTFKKFSIAGLALLFMATAAFAGWSTKASAADMRSLTAAQITAEMGAGWNLGN
QLEATVNGTPNETSWGNPTITPELIKKVKAAGFKTIRIPVSYLNYIGSAPNYTVNASW
LNRIQQVVDYAYNEGLYVVINMHGDGFHSIPGSWLHVNSSNQNVIRDKYQKVWQQ
VATRFSAYNERLIFESMNEVFDGNYNNPNTSYYGNLNAYNQIFVDTVRKTGGNNNA
RWLLVPGWNTNIDYTVGNYGFVVPTDNFRSSAIPSSQKRIMISAHYYSPWDFAGEEN
GNITQWGATATNPAKRSTWGQEDYLDSQFKSMYDKFVTQGYPVVMGEFGSIDKSS
YDSSNNNYRAVYAKAVTATAKKYKLVPVYWDNGFNGQHGFALFNRFNNTVTQQN
IINAIMQGMQ

[0264] Endoglucanase A (EC 3.2.1.4) (Cellulase A) (Endo-1,4-beta-D-glucanase A) Paenibacillus barcinonensis

MTKTFKKFSIAGLALLFMATAAFAGWSTKASAADMRSLTAAQITAEMGAGWNLGN
QLEATVNGTPNETSWGNPTITPELIKKVKAAGFKTIRIPVSYLNYIGSAPNYTVNASW
LNRIQQVVDYAYNEGLYVVINMHGDGFHSIPGSWLHVNSSNQNVIRDKYQKVWQQ
VATRFSAYNERLIFESMNEVFDGNYNNPNTSYYGNLNAYNQIFVDTVRKTGGNNNA
RWLLVPGWNTNIDYTVGNYGFVVPTDNFRSSAIPSSQKRIMISAHYYSPWDFAGEEN
GNITQWGATATNPAKRSTWGQEDYLDSQFKSMYDKFVTQGYPVVMGEFGSIDKSS
YDSSNNNYRAVYAKAVTATAKKYKLVPVYWDNGFNGQHGFALFNRFNNTVTQQN
IINAIMQGMQ

[0265] cellulase (EC 3.2.1.4) Paenibacillus pabuli

MFKKWKKFGISSLALVLVAAVAFTGWSAKASAADASQIVSEMGAGWNLGNQLEAA
VNGTPNETAWGNPTVTPELIKKVKAAGFKSIRIPVSYLNNIGSAPNYTINAAWLNRIQ
QVVDYAYNEGLYVIINIHGDGYNSVQGGWLLVNGGNQTAIKEKYKKVWQQIATKF
SNYNDRLIFESMNEVFDGNYGNPNSAYYTNLNAYNQIFVDTVRQTGGNNNARWLL
VPGWNTNIDYTVGNYGFTLPTDNYRSSAIPSSQKRIMISAHYYSPWDFAGEENGNITQ
WGATSTNPAKKSTWGQEDYLESQFKSMYDKFVTQGYPVVIGEFGSIDKTSYDSSNN
VYRAAYAKAVTAKAKKYKMVPVYWDNGHNGQHGFALFNRSNNTVTQQNIINAIM
QGMQ

[0266] Endoglucanase 5 (EC 3.2.1.4) (Cellulase V) (Endo-1,4-beta-glucanase V) (Endoglucanase V) Pectobacterium carotovorum subsp. carotovorum (Erwinia carotovora subsp. carotovora)

MWMRRNQIVRKLTLGVVTTVLGMSLSFSALSATPVETHGQLSIENGRLVDEQGKRV
QLRGISSHGLQWFGDYVNKDSMKWLRDDWGINVFRVAMYTAADGYISNPSLANKV
KEAVAAAQSLGVYIIIDWHILSDNDPNIYKAQAKTFFAEMAGLYGSSPNVIYEIANEP
NGGVTWNGQIRPYALEVTDTIRSKDPDNLIIVGTGTWSQDIHDAADNQLPDPNTMY
ALHFYAGTHGQFLRDRIDYAQSRGAAIFVSEWGTSDASGNGGPFLPESQTWIDFLNN
RGVSWVNWSLTDKSEASAALAPGASKSGGWTEQNLSTSGKFVREQIRAGANLGGG
DTPTTPTEPTNPGNGTTGDVVLQYRNVDNNPSDDAIRMAVNIKNTGSTPIKLSDLQV
RYYFHDDGKPGANLFVDWANVGPNNIVTSTGTPAASTDKANRYVLVTFSSGAGSLQ
PGAETGEVQVRIHAGDWSNVNETNDYSYGANVTSYANWDKITVHDKGTLVWGVEP

[0267] Endoglucanase 5 (EC 3.2.1.4) (Cellulase V) (Endo-1,4-beta-glucanase V) (Endoglucanase V) Pectobacterium carotovorum subsp. carotovorum (Erwinia carotovora subsp. carotovora)

MWMRRNQIVRKLTLGVVTTVLGMSLSFSALSATPVETHGQLSIENGRLVDEQGKRV
QLRGISSHGLQWFGDYVNKDSMKWLRDDWGINVFRVAMYTAADGYISNPSLANKV
KEAVAAAQSLGVYIIIDWHILSDNDPNIYKAQAKTFFAEMAGLYGSSPNVIYEIANEP
NGGVTWNGQIRPYALEVTDTIRSKDPDNLIIVGTGTWSQDIHDAADNQLPDPNTMY
ALHFYAGTHGQFLRDRIDYAQSRGAAIFVSEWGTSDASGNGGPFLPESQTWIDFLNN
RGVSWVNWSLTDKSEASAALAPGASKSGGWTEQNLSTSGKFVREQIRAGANLGGG
DTPTTPTEPTNPGNGTTGDVVLQYRNVDNNPSDDAIRMAVNIKNTGSTPIKLSDLQV
RYYFHDDGKPGANLFVDWANVGPNNIVTSTGTPAASTDKANRYVLVTESSGAGSLQ
PGAETGEVQVRIHAGDWSNVNETNDYSYGANVTSYANWDKITVHDKGTLVWGVEP

[0268] Endoglucanase 5 (EC 3.2.1.4) (Cellulase V) (Endo-1,4-beta-glucanase V) Pectobacterium parmentieri

MQTVNTQPHRIFRVLLPAVFSSLLLSSLTVSAASSSNDADKLYFGNNKYYLFNNVWG
KDEIKGWQQTIFYNSPISMGWNWHWPSSTHSVKAYPSLVSGWHWTAGYTENSGLPI
QLSSNKSITSNVTYSIKATGTYNAAYDIWFHTTDKANWDSSPTDELMIWLNDTNAGP
AGDYIETVFLGDSSWNVFKGWINADNGGGWNVFSFVHTSGTNSASLNIRHFTDYLV
QTKQWMSDEKYISSVEFGTEIFGGDGQIDITEWRVDVK

[0269] Manganese dependent endoglucanase Eg5A (EC 3.2.1.4) (Carboxymethyl-cellulase 5A) (CMCase 5A) (Cellulase 5A) (Endo-1,4-beta-glucanase Eg5A) Phanerodontia chrysosporium (White-rot fungus) (Sporotrichum pruinosum)

MLKYASIALALATLGVAQQQQWGQCGGIGWTGATTCVAGSVCSVLNPYYSQCIPG
AATVTSSSAPSTPTPPAGALPRLGGVNTAGYDFSVATDGSFTGTGVSPPVSQFSHFSS
QGANLYRIPFAWQLMTPTLGGTISQSFLSRYDQTVQAALNSGPNVFVIIDLHNYARW
NGGIIAQGGPTDAQFQSIWTQLAQKYGSNQRVIFGIMNEPHDIPSISTWVNSVQGAVN
AIRAAGATNYLLLPGSSWSSAQAFPTEAGPLLVKVTDPLGGTSKLIFDVHKYLDSDN
SGTHPDCTTDNVQVLQTLVQFLQANGNRQAILSETGGGNTSSCESLLANELAYVKSA
YPTLAGFSVWAAGAFDTTYVLTVTPNADGSDQPLWVDAVKPNLP

[0270] Cellulase (EC 3.2.1.4) Phocaeicola salanitronis (strain DSM 18170/JCM 13657/BL78) (Bacteroides salanitronis)

MRNCLTLFFLLLTGIALFASCSDDEGGGYTGETQISATEMTFPKSGDTLTLSVLSSVEP
QVTSNQTWCNVSFASVTERGTYTYNVTVDANSETDDRVATLSVVAGSFTASVQVTQ
TAGDGLIVAQTAYDMPAAGGALSITLTTNGDYAYTINDSWIAEAEVTDARAMTEYT
LHFTVSANHGTERTGTITFTLGDLTETVTVTQAAGQAAAVSGETPLEIAVSLGLGWN
LGNQLDAHNNGVADETSWGNAAATQALFDALANAGFTSVRIPVTWLGHVGEAPDY
TIDETYLNRVAEVVGYAESAGLNAIINIHHDGANSQYWLDIKDAATDETVNSAVKA
QLAAMWTQIANRFADKGNFLVFEAMNEIHDGSWGWGDNRTDGGRQYAVLNEWN
QVFVDAVRATGGNNQTRYLGVPGYVTNIDLTVENFVLPQDVVDNRLMVAVHFYDP
IDYTENADNIYSQWGHTADPSLKADWGDEDNVTGQFAKMKETFIDQGIPAYIGEMG
CVHRADDLSESFRLYYLEYVCKAAKDYGMPPFYWDAGGDGTGTQSWALFNHATG
EMLNNAQEVIDVMKRGIFTEDASYTLQSVYDSAPQ

[0271] Cellulase (EC 3.2.1.4)Pseudoalteromonas haloplanktis (Alteromonas haloplanktis)

MNNSSNNHKRKDFKVASLSLALLLGCSTMANAAVEKLTVSGNQILAGGENTSFAGP
SLFWSNTGWGAEKFYTAETVAKAKTEFNATLIRAAIGHGTSTGGSLNFDWEGNMSR
LDTVVNAAIAEDMYVIIDFHSHEAHTDQATAVRFFEDVATKYGQYDNVIYEIYNEPL
QISWVNDIKPYAETVIDKIRAIDPDNLIVVGTPTWSQDVDVASQNPIDRANIAYTLHF
YAGTHGQSYRNKAQTALDNGIALFATEWGTVNADGNGGVNINETDAWMAFFKTN
NISHANWALNDKNEGASLFTPGGSWNSLTSSGSKVKEIIQGWGGGSSNVDLDSDGD
GVSDSLDQCNNTPAGTTVDSIGCAVTDSDADGISDNVDQCPNTPVGETVNNVGCVV
EVVEPQSDADNDGVNDDIDQCPDTPAGTSVDTNGCSVVSSTDCNGINAYPNWVNKD
YSGGPFTHNNTDDKMQYQGNAYSANWYTNSLPGSDASWTLLYTCN

[0272] Cellulase (EC 3.2.1.4)Pseudoalteromonas haloplanktis (Alteromonas haloplanktis)

MKVFFKITTLLLILISYQSLAAFNNNPSSVGAYSSGTYRNLAQEMGKTNIQQKVNSTF
DNMFGYNNTQQLYYPYTENGVYKAHYIKAINPDEGDDIRTEGQSWGMTAAVMLNK
QEEFDNLWRFAKAYQKNPDNHPDAKKQGVYAWKLKLNQNGFVYKVDEGPAPDGE
EYFAFALLNASARWGNSGEFNYYNDAITMLNTIKNKLMENQIIRFSPYIDNLTDPSYH
IPAFYDYFANNVTNQADKNYWRQVATKSRTLLKNHFTKVSGSPHWNLPTFLSRLDG
SPVIGYIFNGQANPGQWYEFDAWRVIMNVGLDAHLMGAQAWHKSAVNKALGFLS
YAKTNNSKNCYEQVYSYGGAQNRGCAGEGQKAANAVALLASTNAGQANEFFNEF
WSLSQPTGDYRYYNGSLYMLAMLHVSGNFKFYNNTFN

[0273] Glucanase (EC 3.2.1.→Pseudomonas putida (strain ATCC 47054/DSM 6125/CFBP 8728/NCIMB 11950/KT2440)

MRQMLVGLVALGLPVFANAGSVCPWPAWERFKAELVSVDGRVIDPSDERLITTSEG
QSYALFFALVGNDRQTFAQLLRWTSNNLAEGDLARHLPAWLWGRDGQQQWQVLD
ANNASDADLWIAYSLLEAGRLWDQPAYTQLGQHLLWRIAAQTVRKLPGLGVMLLP
GDYGFEDAQGTRLNPSYLPLQLLDRFSDVDPLWGELAANTRRLWLASSPKGFAPDW
LLWTPAGKPAADTKHGNAGDYDAIRVYLWVGMLAEGAAQRRELVAHYAPMAALT
QRQGLPPEHLDARSGEARGHGPAGFSAALLPLLAASPEHVAGLAAQRQRLREQPVE
AKAYYSQVLALFGQGFDEARYRFDPHGRLLPAWSAPCSE

[0274] Endoglucanase (EC 3.2.1.4) (Cellulase) (Endo-1,4-beta-glucanase) Ralstonia solanacearum (Pseudomonas solanacearum)

MRRCMPLVAASVAALMLAGCGGGDGDPSLSTASVSATDTTTLKPAATSTTSSVWLT
LAKDSAAFTVSGTRTVRYGAGSAWVEKSVSGSGRCTSTFFGKDPAAGVAKVCQLLQ
GTGTLLWRGVSLAGAEFGEGSLPGTYGSNYIYPSADSVTYYKNKGMNLVRLPFRWE
RLQPTLNQVFDANELSRLTGFVNAVTATGQTVLLDPHNYARYYGNVIGSSAVPNSA
YADFWRRLATQFKSNPRVILGLMNEPNSMPTEQWLSGANAELAAIRSANASNVVFV
PGNAWTGAHSWNQNWYGTPNGTVMKGINDPGHNLVFEVHQYLDGDSSGQSANCV
SATIGAQRLQDFTTWLRSNGYRGFLGEFGAASNDTCNQAVSNMLTFVKNNADVWT
GWAWWAGGPWWGGYMYSIEPSNGVDKPQMSVLAPYLK

[0275] Endoglucanase (EC 3.2.1.4) (Cellulase) (Endo-1,4-beta-glucanase) Ralstonia solanacearum (Pseudomonas solanacearum)

MRRCMPLVAASVAALMLAGCGGGDGDPSLSTASVSATDTTTLKPAATSTTSSVWLT
LAKDSAAFTVSGTRTVRYGAGSAWVEKSVSGSGRCTSTFFGKDPAAGVAKVCQLLQ
GTGTLLWRGVSLAGAEFGEGSLPGTYGSNYIYPSADSVTYYKNKGMNLVRLPFRWE
RLQPTLNQVFDANELSRLTGFVNAVTATGQTVLLDPHNYARYYGNVIGSSAVPNSA
YADFWRRLATQFKSNPRVILGLMNEPNSMPTEQWLSGANAELAAIRSANASNVVFV
PGNAWTGAHSWNQNWYGTPNGTVMKGINDPGHNLVFEVHQYLDGDSSGQSANCV
SATIGAQRLQDFTTWLRSNGYRGFLGEFGAASNDTCNQAVSNMLTFVKNNADVWT
GWAWWAGGPWWGGYMYSIEPSNGVDKPQMSVLAPYLK

[0276] Cellulase (EC 3.2.1.4)Rhodothermus marinus (Rhodothermus obamensis)

MNVMRAVLVLSLLLLFGCDWLFPDGDNGKEPEPEPEPTVELCGRWDARDVAGGRY
RVINNVWGAETAQCIEVGLETGNFTITRADHDNGNNVAAYPAIYFGCHWAPARAIR
DCAARAGAVRRAHELDVTPITTGRWNAAYDIWFSPVTNSGNGYSGGAELMIWLNW
NGGVMPGGSRVATVELAGATWEVWYADWDWNYIAYRRTTPTTSVSELDLKAFIDD
AVARGYIRPEWYLHAVETGFELWEGGAGLRTADFSVTVQ

[0277] Glucanase (EC 3.2.1.→Ruminiclostridium cellulolyticum

MKSKLIKLSAIIISGVMLTTSFVNTGTAFAAGTHDYSTALKDSIIFFDANKCGPQAGEN
NVFDWRGACHTTDGSDVGVDLTGGYHDAGDHVKFGLPQGYSAAILGWSLYEFKES
FDATGNTTKMLQQLKYFTDYFLKSHPNSTTFYYQVGEGNADHTYWGAPEEQTGQR
PSLYKADPSSPASDILSETSAALTLMYLNYKNIDSAYATKCLNAAKELYAMGKANQ
GVGNGQSFYQATSFGDDLAWAATWLYTATNDSTYITDAEQFITLGNTMNENKMQD
KWTMCWDDMYVPAALRLAQITGKQIYKDAIEINFNYWKTQVTTTPGGLKWLSNWG
VLRYAAAESMVMLVYCKQNPDQSLLDLAKKQVDYILGDNPANMSYIIGYGSNWCI
HPHHRAANGYTYANGDNAKPAKHLLTGALVGGPDQNDKFLDDANQYQYTEVALD
YNAGLVGVLAGAIKFFGGTIVNPPVKKGDLNNDTFIDAIDLALCKNYILTQNGNIDK
NNADMNGDGSIDAIDFSLLKKAILG

[0278] Endoglucanase A (EC 3.2.1.4) (Cellulase A) (EGCCA) (Endo-1,4-beta-glucanase A) Ruminiclostridium cellulolyticum (strain ATCC 35319/DSM 5812/JCM 6584/H10) (Clostridium cellulolyticum)

MKKTTAFLLCFLMIFTALLPMQNANAYDASLIPNLQIPQKNIPNNDGMNFVKGLRLG
WNLGNTFDAFNGTNITNELDYETSWSGIKTTKQMIDAIKQKGFNTVRIPVSWHPHVS
GSDYKISDVWMNRVQEVVNYCIDNKMYVILNTHHDVDKVKGYFPSSQYMASSKKY
ITSVWAQIAARFANYDEHLIFEGMNEPRLVGHANEWWPELTNSDVVDSINCINQLNQ
DFVNTVRATGGKNASRYLMCPGYVASPDGATNDYFRMPNDISGNNNKIIVSVHAYC
PWNFAGLAMADGGTNAWNINDSKDQSEVTWFMDNIYNKYTSRGIPVIIGECGAVDK
NNLKTRVEYMSYYVAQAKARGILCILWDNNNFSGTGELFGFFDRRSCQFKFPEIIDG
MVKYAFEAKTDPDPVIVYGDYNNDGNVDALDFAGLKKYIMAADHAYVKNLDVNL
DNEVNAFDLAILKKYLLGMVSKLPSN

[0279] Endoglucanase C (EC 3.2.1.4) (Cellulase C) (EGCCC) (Endo-1,4-beta-glucanase C) Ruminiclostridium cellulolyticum (strain ATCC 35319/DSM 5812/JCM 6584/H10) (Clostridium cellulolyticum)

MIKGSSLKRFKSLVMAAIFSVSIISTAIASSAADQIPFPYDAKYPNGAYSCLADSQSIGN
NLVRSEWEQWKSAHITSNGARGYKRVQRDASTNYDTVSEGLGYGLLLSVYFGEQQ
LFDDLYRYVKVFLNSNGLMSWRIDSSGNIMGKDSIGAATDADEDIAVSLVFAHKKW
GTSGGFNYQTEAKNYINNIYNKMVEPGTYVIKAGDTWGGSNVTNPSYFAPAWYRIF
ADFTGNSGWINVANKCYEIADKARNSNTGLVPDWCTANGTPASGQGFDFYYDAIRY
QWRAAIDYSWYGTAKAKTHCDAISNFFKNIGYANIKDGYTISGSQISSNHTATFVSC
AAAAAMTGTDTTYAKNIYNECVKVKDSGNYTYFGNTLRMMVLLYTTGNFPNLYTY
NSQPKPDLKGDVNNDGAIDALDIAALKKAILTQTTSNISLTNADMNNDGNIDAIDFA
QLKVKLLN

[0280] Endoglucanase F (EC 3.2.1.4) (Cellulase F) (EGCCF) (Endo-1,4-beta-glucanase F) Ruminiclostridium cellulolyticum (strain ATCC 35319/DSM 5812/JCM 6584/H10) (Clostridium cellulolyticum)

MSKNFKRVGAVAVAAAMSLSIMATTSINAASSPANKVYQDRFESMYSKIKDPANGY
FSEQGIPYHSIETLMVEAPDYGHVTTSEAMSYYMWLEAMHGRFSGDFTGFDKSWSV
TEQYLIPTEKDQPNTSMSRYDANKPATYAPEFQDPSKYPSPLDTSQPVGRDPINSQLT
SAYGTSMLYGMHWILDVDNWYGFGARADGTSKPSYINTFQRGEQESTWETIPQPCW
DEHKFGGQYGFLDLFTKDTGTPAKQFKYTNAPDADARAVQATYWADQWAKEQGK
SVSTSVGKATKMGDYLRYSFFDKYFRKIGQPSQAGTGYDAAHYLLSWYYAWGGGI
DSTWSWIIGSSHNHFGYQNPFAAWVLSTDANFKPKSSNGASDWAKSLDRQLEFYQW
LQSAEGAIAGGATNSWNGRYEAVPSGTSTFYGMGYVENPVYADPGSNTWFGMQV
WSMQRVAELYYKTGDARAKKLLDKWAKWINGEIKFNADGTFQIPSTIDWEGQPDT
WNPTQGYTGNANLHVKVVNYGTDLGCASSLANTLTYYAAKSGDETSRQNAQKLLD
AMWNNYSDSKGISTVEQRGDYHRFLDQEVFVPAGWTGKMPNGDVIKSGVKFIDIRS
KYKQDPEWQTMVAALQAGQVPTQRLHRFWAQSEFAVANGVYAILFPDQGPEKLLG
DVNGDETVDAIDLAILKKYLLNSSTTINTANADMNSDNAIDAIDYALLKKALLSIQ

[0281] Endoglucanase G (EC 3.2.1.4) (Cellulase G) (EGCCG) (Endo-1,4-beta-glucanase G) Ruminiclostridium cellulolyticum (strain ATCC 35319/DSM 5812/JCM 6584/H10) (Clostridium cellulolyticum)

MLKTKRKLTKAIGVALSISILSSLVSFIPQTNTYAAGTYNYGEALQKSIMFYEFQRSG
DLPADKRDNWRDDSGMKDGSDVGVDLTGGWYDAGDHVKFNLPMSYTSAMLAWS
LYEDKDAYDKSGQTKYIMDGIKWANDYFIKCNPTPGVYYYQVGDGGKDHSWWGP
AEVMQMERPSFKVDASKPGSAVCASTAASLASAAVVFKSSDPTYAEKCISHAKNLF
DMADKAKSDAGYTAASGYYSSSSFYDDLSWAAVWLYLATNDSTYLDKAESYVPN
WGKEQQTDIIAYKWGQCWDDVHYGAELLLAKLINKQLYKDSIEMNLDFWTTGVN
GTRVSYTPKGLAWLFQWGSLRHATTQAFLAGVYAEWEGCTPSKVSVYKDFLKSQID
YALGSTGRSFVVGYGVNPPQHPHHRTAHGSWTDQMTSPTYHRHTIYGALVGGPDN
ADGYTDEINNYVNNEIACDYNAGFTGALAKMYKHSGGDPIPNFKAIEKITNDEVIIKA
GLNSTGPNYTEIKAVVYNQTGWPARVTDKISFKYFMDLSEIVAAGIDPLSLVTSSNYS
EGKNTKVSGVLPWDVSNNVYYVNVDLTGENIYPGGQSACRREVQFRIAAPQGTTY
WNPKNDFSYDGLPTTSTVNTVTNIPVYDNGVKVFGNEPAGGSENPDPEILYGDVNSD
KNVDALDFAALKKYLLGGTSSIDVKAADTYKDGNIDAIDMATLKKYLLGTITQLPQ
G

[0282] Endoglucanase A (EC 3.2.1.4) (Cellulase A) (EGCCA) (Endo-1,4-beta-glucanase A) Ruminiclostridium cellulolyticum (strain ATCC 35319/DSM 5812/JCM 6584/H10) (Clostridium cellulolyticum)

MKKTTAFLLCFLMIFTALLPMQNANAYDASLIPNLQIPQKNIPNNDGMNFVKGLRLG
WNLGNTFDAFNGTNITNELDYETSWSGIKTTKQMIDAIKQKGFNTVRIPVSWHPHVS
GSDYKISDVWMNRVQEVVNYCIDNKMYVILNTHHDVDKVKGYFPSSQYMASSKKY
ITSVWAQIAARFANYDEHLIFEGMNEPRLVGHANEWWPELTNSDVVDSINCINQLNQ
DFVNTVRATGGKNASRYLMCPGYVASPDGATNDYFRMPNDISGNNNKIIVSVHAYC
PWNFAGLAMADGGTNAWNINDSKDQSEVTWFMDNIYNKYTSRGIPVIIGECGAVDK
NNLKTRVEYMSYYVAQAKARGILCILWDNNNFSGTGELFGFFDRRSCQFKFPEIIDG
MVKYAFEAKTDPDPVIVYGDYNNDGNVDALDFAGLKKYIMAADHAYVKNLDVNL
DNEVNAFDLAILKKYLLGMVSKLPSN

[0283] Beta-1,4-endoglucanase (EC 3.2.1.4) Ruminiclostridium josui (Clostridium josui)

MFRNTNKRILAFVIVVAMLMYFIPTMTFAVEEDSSHLITNQAKKPSTAGALQLLNKN
GVKTLCDKDGNPIQLRGMSTHGLQWFPEIINNNAFAALSKDWGSNVIRLAMYVAEG
GYSKDPEIIKKRVIDGIDLAIANDMYVIVDWHVLTPGDPNADVYKGAMDFFKEISQK
YPNNPHIIYELANEPSPNDPGVTNDAAGWAKVKSYAEPIIKILRDSGNKNLIIVGSPN
WSQRPDLAAENPINDNNTAYSFHFYSGTHKTSTDSTDRGNIMSNARYALEHGVAVF
CSEWGTSEASGNNGPYLKEADEWLEFLNANNISWINWSLTNKNETSGSFIPFISGKSD
ATNLNPGDDQVWSLKELSVSGEYARARIKGIKYEPIERSEKEEFTTNVWDFNDGTTQ
GFGINGDSPIKADSITLANEKNALKITGLNNSNDLTEGNYWANVRLSADGTSNKPNIF
GAEKLTMDVITAAPATVSIAAIPQSSTHGWANPTRAIAVKPADFVKQEDGTYKAVLT
ITPADSPNFDSIAKDSKDSTMTNIILFVGADTDVISLDNITVSGNRAVVEAPVEHAPIG
KATLPSTFEDSTRQGWAWDATSGVQSALTIKDANESKAISWEVKYPEVKPVDGWAS
APRIMLGNVNTTRGNNKYLTFDFYLKPTQASKGSLTISLAFAPPSLGFWAQATGDVN
IPLSSLSKMKKTTDGLYHFQVKYDLDKINDGKVLTANTVLRDITIVVADGNSDFAGT
MYLDNIRFENDSKTELNNSITMLVSKGIINNADVKKINFNSSISRGEFLMWIVKTLDL
NAKFSSNFSDVNKKGSYYNSVGIAKALGITSGVGNNKFNPNKAISREDMLVLTYKAL
KIVNKNLAKGNANDLKQFTDASKVSKNAVESVATIVKNGFYSGDAKKLNPKASVA
KSEAALMLYKIYSSLHK

[0284] Cellulase (EC 3.2.1.4) Ruminiclostridium papyrosolvens DSM 2782

MFKNMKKTISKVLVSSIIMSALFMVSAPAGVSAASDVTVNLGSTKQEIRGFGASSAW
CGTISDYVMNSLYGDLGYSILRLRIEEGIGDAWKTGNFSKWSPELANAKKASAKGAI
VFASPWNPPASMQENFSKSGDSSAQRLRYDKYTEYAQYLNAYVKYMKDNGVDLY
AISVQNEPDYAQDWTWWTPQEMLNFMKNNAGSINCRVMAPESFQFLKNMSDPILN
DATALDNMDVLGCHFYGTSVNNMAYPLYQQKSAGKELWMTEKYFDDDTTGNIMN
MSKEIHDSMVTGNMNAYIYWWITWPNGLATSSGTIYKRAYVLGQFAKFIRPGYKRV
DATATPNTNVYVSAYTGDNKAVIVAINTGTAAVSQKFNFQNGSASSVVSYVTDSSR
NMAAGANIAVINGSFTAQLPAQSITTFVGNTAPVVVEPIDAFNKIEAENYYDQSGTQ
TEANSDGNGKNVGYIENEDYLVFKNVDFGSGAASFEASAGSATNGGNIELRLDSLTG
TLIGNCAVPGTGGWQTWTNATCNVSQVTGKHDVYLKFTGESGYLMNLDWFKENT
KVIPVGKLGDINGDASIDSLDLMLIKKHLLGEAIENTALADLDGSGAVDAIDLAQMK
QYLLGIISAFPGKA

[0285] Endoglucanase 1 (EC 3.2.1.4) (Cellulase) (Endo-1,4-beta-glucanase) (Endoglucanase I) (EG-I) Ruminococcus albus

MNSKKIGAMIAAAVLSLIVMTPAATRKIVQRQTRNSSTAVENSAADESETENVPVSQ
THTNDTMTVTSAKDLVAKMTNGWNLGNTMDATAQGLGSEVSWLPLKVTTNKYMI
DMLPEAGFNVLRIPVSWGNHIIDDKYTSDPAWMDRVQEIVNYGIDNGLYVILNTHHE
EWYMPKPSEKDGDIEEIKAVWAQIADRFKGYDEHLIFEGLNEPRLRGEGAEWTGTSE
AREIINEYEKAFVETVRASGGNNGDRCLMITGYAASSAYNNLSAIELPEDSDKLIISVH
AYLPYSFALDTKGTDKYDPEDTAIPELFEHLNELFISKGIPVIVGEFGTMNKENTEDR
VKCLEDYLAAAAKYDIPCVWWDNYARIGNGENFGLMNRADLEWYFPDLIETFKTY
AEKDPASAE

[0286] Endoglucanase A (EC 3.2.1.4) (Cellulase A) (Endo-1,4-beta-glucanase A) (EGA) (Endo-1,4-beta-xylanase) (EC 3.2.1.8) Ruminococcus albus

MRKPDKDADRLTTLDLARSGEVRDISAMELVGEMKTGWNLGNSLDATGAPGNASE
VNWGNPKTTKEMIDAVYNKGFDVIRIPVTWGGHVGDAPDYKIDDEWIARVQEVVN
YAYDDGAYVIINSHHEEDWRIPDNEHIDAVDEKTAAIWKQVAERFKDYGDHLIFEGL
NEPRVKGSPQEWNGGTEEGRRCVDRLNKTFLDTVRATGGNNEKRLLLMTTYASSS
MSNVIKDTAIPEDDHIGFSIHAYTPYAFTYNANADWELFHWDDSHDGELVSLMTNL
KENYLDKDIPVIITEYGAVNKDNNDEDRAKWVSSYIEYAELLGGIPCVWWDNGYYS
SGNELFGIFDRNTCTWFTDTVTDAIIENAK

[0287] Endoglucanase (EC 3.2.1.4) Ruminococcus albus

MSKNAKIAVIAAFAVLATMMGMLFAKINALEAQNSAGGSPSVPAAAMQKNASQNN
ESSDSSNVTQNQDDEIVLDISYGESWGEMGEYYTNVTLNLKNTSDKAVSNWEVLLS
SAEGTRIEQIWNGEKSQEGNIIHITPVEYNKEIAPLAHLQAAPGMIVVSREKLLFESFS
AKAVIDGSDILIKSSENNISPQENNVVSLPAEQDLPISNGSGVSALGQLKVIGTKLCAE
DGSVVVLEGMSSHGLAWYPEFSAKYSVKKTKEYGANVYRAAMYTEEYGGYTTGE
NFRQEAEKILINAVDTAKSLDMYAIIDWHILSDGSPSKHKNEAIDFFDRISQKYANDP
AVIYEICNEPNGSDWSSDIKPYANEIIPVIRKNSPNAIVIVGTNTWSQDVDKASEDKLS
FDNIMYSFHFYAGTHKLDVFKQKIEKALANGCAVFVTEWGTSAADGNNGVYIKESG
EWLKYLSSKQISRINWSLSNKNESSAAVLPSASAENFSYEDLSESGKFVFDSFGNY

[0288] Endoglucanase (EC 3.2.1.4) Ruminococcus albus

MKESEIFINQIGYKPLDNKNVFVTNAAKGDAKEFTLCKKSDGQVVFTGALTAAPDDE
LSGGNYFTGDFSSIKTAGEYYVCVGQERSFDFKIADNVYDDVALSTLKYFTDSRCGQ
GICHTGIAEVYGTGEKKNVQGGWHDAGDYGRYIVAGTKTVMDMLLAYKKCPEKFA
NFDLLGEVRFELEWMLQMQRDDGAVYHKISCYHFCAFIMPQDEKDQLVLAPVSTA
ATADFAGCLAYASGFYKADDPDFAKKLLDAALKAQTYLFSHDDEFYINPPEITTGGY
GDRDVRDERYFALCSLFAATGDKNYLTQALKFREEKKKDKPDPKHPWNCGWQEGF
GWPFVAGYGTEILLEVAAENEENTALSPDLIAEIHTCIIAQAEKILEISNSSAFKYCSKL
VFWGSNGAICDLAHIMLMAYDLTGREDFFKAAKAQIDYILGCNPVNYCYVTGAGSK
PVVNPHHRPSGASGRVYPGMLSGGPCAGLLDAYAKEHLTGLPALKCFADAQPSYST
NEVAIYWNSAFVYLLARVR

[0289] Endoglucanase 4 (EC 3.2.1.4) (Cellulase 4) (Endo-1,4-beta-glucanase 4) (Endoglucanase IV) (EG-IV) Ruminococcus albus

MLDKLKVINGKLTAGEKPVRLFGLSTHGIAWYPEYICEESFNALKKDWRTNCIRIAM
YTDEFRGYCKDGNKQHLKELIEKGVVIAEKLDMYVIVDWHVLCDQDPMKYIDEAEE
FFSDMSKRFANKTNVIYEICNEPNCSGTWDKITEYADRIIPIIRSNSPDALIVTGTSTWS
QDIHCALEKPLKWDNVMYSLHFYAATHKGTLRSRLERCIEAGLPVFINEFNLCEASG
KGDIDIDEANAWYEVIDRLGLSCISWCLSNSGDTCGVFTQNCTKLSGWTDEDIKTSG
KIIKGWFEAFADEENTNEQCFRIDK

[0290] Endoglucanase 1 (EC 3.2.1.4) (Cellulase) (Endo-1,4-beta-glucanase) (Endoglucanase I) (EG-I) Ruminococcus albus

MNSKKIGAMIAAAVLSLIVMTPAATRKIVQRQTRNSSTAVENSAADESETENVPVSQ
THTNDTMTVTSAKDLVAKMTNGWNLGNTMDATAQGLGSEVSWLPLKVTTNKYMI
DMLPEAGFNVLRIPVSWGNHIIDDKYTSDPAWMDRVQEIVNYGIDNGLYVILNTHHE
EWYMPKPSEKDGDIEEIKAVWAQIADRFKGYDEHLIFEGLNEPRLRGEGAEWTGTSE
AREIINEYEKAFVETVRASGGNNGDRCLMITGYAASSAYNNLSAIELPEDSDKLIISVH
AYLPYSFALDTKGTDKYDPEDTAIPELFEHLNELFISKGIPVIVGEFGTMNKENTEDR
VKCLEDYLAAAAKYDIPCVWWDNYARIGNGENFGLMNRADLEWYFPDLIETFKTY
AEKDPASAE

[0291] Endoglucanase 5A (EC 3.2.1.4) (Alkaline cellulase) (Endo-1,4-beta-glucanase 5A) Salipaludibacillus agaradhaerens (Bacillus agaradhaerens)

MKKITTIFVVLLMTVALFSIGNTTAADNDSVVEEHGQLSISNGELVNERGEQVQLKG
MSSHGLQWYGQFVNYESMKWLRDDWGINVFRAAMYTSSGGYIDDPSVKEKVKEA
VEAAIDLDIYVIIDWHILSDNDPNIYKEEAKDFFDEMSELYGDYPNVIYEIANEPNGSD
VTWGNQIKPYAEEVIPIIRNNDPNNIIIVGTGTWSQDVHHAADNQLADPNVMYAFHF
YAGTHGQNLRDQVDYALDQGAAIFVSEWGTSAATGDGGVFLDEAQVWIDFMDER
NLSWANWSLTHKDESSAALMPGANPTGGWTEAELSPSGTFVREKIRESASIPPSDPTP
PSDPGEPDPTPPSDPGEYPAWDPNQIYTNEIVYHNGQLWQAKWWTQNQEPGDPYGP
WEPLN

[0292] Endoglucanase 5A (EC 3.2.1.4) (Alkaline cellulase) (Endo-1,4-beta-glucanase 5A) Salipaludibacillus agaradhaerens (Bacillus agaradhaerens)

MKKITTIFVVLLMTVALFSIGNTTAADNDSVVEEHGQLSISNGELVNERGEQVQLKG
MSSHGLQWYGQFVNYESMKWLRDDWGINVFRAAMYTSSGGYIDDPSVKEKVKEA
VEAAIDLDIYVIIDWHILSDNDPNIYKEEAKDFFDEMSELYGDYPNVIYEIANEPNGSD
VTWGNQIKPYAEEVIPIIRNNDPNNIIIVGTGTWSQDVHHAADNQLADPNVMYAFHF
YAGTHGQNLRDQVDYALDQGAAIFVSEWGTSAATGDGGVFLDEAQVWIDFMDER
NLSWANWSLTHKDESSAALMPGANPTGGWTEAELSPSGTFVREKIRESASIPPSDPTP
PSDPGEPDPTPPSDPGEYPAWDPNQIYTNEIVYHNGQLWQAKWWTQNQEPGDPYGP
WEPLN

[0293] Endoglucanase 1 (EC 3.2.1.4) (CEL1) (CMCase I) (Cellulase I) (Endo-1,4-beta-glucanase 1) Streptomyces halstedii

MSRKLRTLMAALCALPLAFAAAPPAHAADPTTMTNGFYADPDSSASRWAAANPGD
GRAAAINASIANTPMARWFGSWSGAIGTAAGAYAGAADGRDKLPILVAYNIYNRDY
CGGHSAGGAASPSAYADWIARFAGGIAARPAVVILEPDSLGDYGCMNPAQIDEREA
MLTNALVQFNRQAPNTWVYMDAGNPRWADAATMARRLHEAGLRQAHGFSLNVS
NYITTAENTAYGNAVNNELAARYGYTKPFVVDTSRNGNGSNGEWCNPSGRRIGTPT
RTGGGAEMLLWIKTPGESDGNCGVGSGSTAGQFLPEVAYKMIYGY

[0294] Endoglucanase CelA (EC 3.2.1.4) (Cellulase) (Endo-1,4-beta-glucanase) Streptomyces lividans

MKRLLALLATGVSIVGLTALAGPPAQAATGCKAEYTITSQWEGGFQAGVKITNLGD
PVSGWTLGFTMPDAGQRLVQGWNATWSQSGSAVTAGGVDWNRTLATGASADLGF
VGSFTGANPAPTSFTLNGATCSGSVTDPPTDPPTDPPATGTPAAVNGQLHVCGVHLC
NQYDRPIQLRGMSTHGIQWFGPCYGDASLDRLAQDWKSDLLRVAMYVQEDGYETD
PAGFTSRVNGLVDMAEDRGMYAVIDFHTLTPGDPNYNLDRARTFFSSVAARNDKKN
VIYEIANEPNGVSWTAVKSYAEQVIPVIRAADPDAVVIVGTRGWSSLGVSDGANESE
VVNNPVNATNIMYAFHFYAASHKDDYRAAVRPAATRLPLFVSEFGTVSATAWSVD
RSSSVAWLDLLDQLKISYANWTYSDADEGSAAFRPGTCEGTDYSSSGVLTESGALV
KSRISTTDDFPTS

[0295] Endoglucanase CelA (EC 3.2.1.4) (Cellulase) (Endo-1,4-beta-glucanase) Streptomyces lividans

MKRLLALLATGVSIVGLTALAGPPAQAATGCKAEYTITSQWEGGFQAGVKITNLGD
PVSGWTLGFTMPDAGQRLVQGWNATWSQSGSAVTAGGVDWNRTLATGASADLGF
VGSFTGANPAPTSFTLNGATCSGSVTDPPTDPPTDPPATGTPAAVNGQLHVCGVHLC
NQYDRPIQLRGMSTHGIQWFGPCYGDASLDRLAQDWKSDLLRVAMYVQEDGYETD
PAGFTSRVNGLVDMAEDRGMYAVIDFHTLTPGDPNYNLDRARTFFSSVAARNDKKN
VIYEIANEPNGVSWTAVKSYAEQVIPVIRAADPDAVVIVGTRGWSSLGVSDGANESE
VVNNPVNATNIMYAFHFYAASHKDDYRAAVRPAATRLPLFVSEFGTVSATAWSVD
RSSSVAWLDLLDQLKISYANWTYSDADEGSAAFRPGTCEGTDYSSSGVLTESGALV
KSRISTTDDFPTS

[0296] Cellulase 1 (EC 3.2.1.4) (Avicelase) (Endo-1,4-beta-glucanase) (Endoglucanase) Streptomyces reticuli

MKRRTTAVLTLTALLGTALTALPVQQAGAEEVEQVRNGTFDTTTDPWWTSNVTAG
LSDGRLCADVPGGTTNRWDSAIGQNDITLVKGETYRFSFHASGIPEGHVVRAVVGLA
VSPYDTWQEASPVLTEADGSYSYTFTAPVDTTQGQVAFQVGGSTDAWRFCVDDVSL
LGGVPPEVYEPDTGPRVRVNQVAYLPAGPKNATLVTDATARLPWQLRNAQGTTVA
RGLTVPRGVDASSGQNVHSIDFGSYRGRGTGYTLVADGETSHPFDIDAAAYRPLRLD
SVKYYYTQRSGIAIRDDLRPGYGRAAGHLNVAPNQGDANVPCQPGVCDYTLDVTG
GWYDAGDHGKYVVNGGIATWELLSTYERSLTARTGHPAALGDGTLALPESGNKVP
DVLDEARWELEFLLKMQVPAGQPLAGMAHHKLHDEQWTGLPLLPDQDPQKRELHP
PTTAATLNLAATAAQAARLYRPFDKAFAARALTAARTAWQAALAHPDLLADPNDG
TGGGAYNDDDVTDEFYWAAAELYLTTGERQFADHVLDSPVHTADIFGPTGFDWGH
TAAAGRLDLALVPSRLPGRDQVRRSVIKAADTYLATLTAHPYGMPYAPAGNRYDW
GSSHQVLNNGVVLASAYDLTGAAKYRDGALQGMDYVLGRNALNMSYVTGYGEVS
SHNQHSRWYAHQLDPTLPNPPSGTLAGGPNSSIQDPYAQSKLTGCVGQFCYIDDIQS
WSTNETAINWNAALARMASFAADQG

[0297] Cellulase 1 (EC 3.2.1.4) (Avicelase) (Endo-1,4-beta-glucanase) (Endoglucanase) Streptomyces reticuli

MKRRTTAVLTLTALLGTALTALPVQQAGAEEVEQVRNGTFDTTTDPWWTSNVTAG
LSDGRLCADVPGGTTNRWDSAIGQNDITLVKGETYRFSFHASGIPEGHVVRAVVGLA
VSPYDTWQEASPVLTEADGSYSYTFTAPVDTTQGQVAFQVGGSTDAWRFCVDDVSL
LGGVPPEVYEPDTGPRVRVNQVAYLPAGPKNATLVTDATARLPWQLRNAQGTTVA
RGLTVPRGVDASSGQNVHSIDFGSYRGRGTGYTLVADGETSHPFDIDAAAYRPLRLD
SVKYYYTQRSGIAIRDDLRPGYGRAAGHLNVAPNQGDANVPCQPGVCDYTLDVTG
GWYDAGDHGKYVVNGGIATWELLSTYERSLTARTGHPAALGDGTLALPESGNKVP
DVLDEARWELEFLLKMQVPAGQPLAGMAHHKLHDEQWTGLPLLPDQDPQKRELHP
PTTAATLNLAATAAQAARLYRPFDKAFAARALTAARTAWQAALAHPDLLADPNDG
TGGGAYNDDDVTDEFYWAAAELYLTTGERQFADHVLDSPVHTADIFGPTGFDWGH
TAAAGRLDLALVPSRLPGRDQVRRSVIKAADTYLATLTAHPYGMPYAPAGNRYDW
GSSHQVLNNGVVLASAYDLTGAAKYRDGALQGMDYVLGRNALNMSYVTGYGEVS
SHNQHSRWYAHQLDPTLPNPPSGTLAGGPNSSIQDPYAQSKLTGCVGQFCYIDDIQS
WSTNETAINWNAALARMASFAADQG

[0298] Endoglucanase 1 (EC 3.2.1.4) (CMCase I) (Carboxymethyl cellulase) (Cellulase) (Endo-1,4-beta-glucanase) Streptomyces sp. (strain KSM-9)

MENPRTTPTPTPLRRRRSERRARGGRVLTALTGVTLLAGLAIAPAATGASPSPAPPAS
PAPSADSGTADAGTTALPSMELYRAEAGVHAWLDANPGDHRAPLIAERIGSQPQAV
WFAGAYNPGTITQQVAEVTSAAAAAGQLPVVVPYMIPFRDCGNHSGGGAPSFAAYA
EWSGLFAAGLGSEPVVVVLEPDAIPLIDCLDNQQRAERLAALAGLAEAVTDANPEAR
VYYDVGHSAWHAPAAIAPTLVEAGILEHGAGIATNISNYRTTTDETAYASAVIAELG
GGLGAVVDTSRNGNGPLGSEWCDPPGRLVGNNPTVNPGVPGVDAFLWIKLPGELDG
CDGPVGSFSPAKAYELAGG

[0299] Endoglucanase (EC 3.2.1.4) Streptomyces sp. (strain SirexAA-E/ActE)

MRTAIRTARRPQPLALLLRGLAAFLGLALAGALGPATARAADLPQRAEARAAGLHIS
DGRLVEGNGNDFVMRGINHAHTWYPGETQSLADIKATGANTVRVVLSDGYRWSEN
SPEDVASIIARCKAERLICVLEVHDTTGYGEDAAAGTLDHAADYWIGLKDVLDGEED
YVVINIGNEPWGNADPAGWTAPTTAAIQKLRAAGFAHTIMVDAPNWGQDWEGVM
RADARSVYDADPTGNLIFSIHMYSVYDTAAKVTDYLNAFVDAGLPLLIGEFGGPADQ
YGDPDEDTMMATAEELGLGYLAWSWSGNTDPVLDLVLDFDPTRLSSWGERVLHGP
DGITETSREATVFGGGQGGGDTEAPTAPGTPTASGVTATSVTLGWSAATDDVGVTA
YDVVRVTGGSETKVASSAATSVTVTGLSAGTAYSFAVYARDAAGNRSARSGTVSVT
TDEGGSVPGGACSVGYRVIGEWPGGFQGEITLRNTGAAAVDGWTLGFAFADGQTVT
NMWGGTATQSGGAVSVTPASYTSTIAAGGSVTVGFTGTLTGANAAPAAFTLNGATC
TAA

[0300] Endoglucanase (EC 3.2.1.4) Streptomyces thermolilacinus

MRTAPPAPPGRSLRGLLAALVGLLVLAVGGAPAAARTAPPGSAGQPPDAAVTGLHV
QGGRLLEGNGNDFVMRGVNHAHTWYPGQTRSLADIKALGANTVRVVLSDGHRWT
RNGPADVAAVIDRCKANRLICVLEVHDTTGYGEEPAAGTLDHAADYWISLMDVLA
GQEDYVIVNIGNEPWGNTDPAGWTAPTIAAVKKLRAAGLAHTLMIDAPNWGQDWQ
GVMRADARSVYEADPTGNLLFSIHMYSVFDTAAEIDDYLEAFVDAGLPLVIGEFGGP
PDQWGDPDEDTMLAAAERLRLGYLAWSWSGNTDPVLDLAIGFDPDRLSGWGQRVF
HGVHGIGETSREATVFGGETPGDTRPPAAPGAPVASAVTAASATLTWPAATDDVGV
TGYEVVRVTGDTETRVAASTTPTATLTGLTAGTTYTFAVYARDAAGNRSPRSATVT
VTTDQGGGTPGTACSVAYRVVNEWPGGFQGEITLRNTGTAALGGWTLGFTFRDGQ
TITHMWGGTATRDGAEVTVAPAPYTSTVPAGGSVTLGFTGGRGTANTAPTAFTVNG
TPCAIG

[0301] Endoglucanase (EC 3.2.1.4) Streptomyces thermoluteus

MRTPDRTVPRAAALLAALAGLLLTLLVPTTPAHAAPTGFRVQNGRLLEASGNDFVM
RGVNHAHTWYADRLDALDHIKAKGANTVRVVLSSGDRWTRNDTADVANVVAQC
KRNRLICVLEVHDTTGYGEQSGAVTLSRAADYWIEVRDALAGQEDYVIVNIGNEPH
GNTDYTRWTADTKAAVQKLRAAGFGHTLMVDAPNWGQDWAFTMRDNAASVFAA
DPDANTVFSIHMYGVFDTAAEVSDYLGRFVAAKLPVVVGEFGHDHSDGNPDEDAIL
SVTRQLGIGYLGWSWSGNGGGVEYLDMVENFDPARTTSWGQRLFDGPDGIAATSEE
AAVYRGGPGEDTTAPTAPGAPAASAVTSSSVTLTWGAATDTVGVTGYDVVRVAGG
QETVVASSSDTTATVTGLAADTSYTFAVYARDAAGNRSARSATATVTTASGPAAGS
CAVTYRVTGEWPGGFQGEVVVRNTGSTAVDGWTLRWTFPDGQRITSLWGGTVTQS
GAEVSVAAAPYTATIPPSGAVSLGFTGSRAGTNTDPTVFLLNGAECSAA

[0302] Cellulase (EC 3.2.1.4) Teredinibacter turnerae (strain ATCC 39867/T7901)

MFPRLSPSRFRQVTLTLLTLGLVSLTGCAGNSKPDADTSTAGAVATGEYRNLFAEIG
KSEIDIQRKIDEAFQHLFYGDAKDAAVYYQAGGNENGPLAYVYDVNSNDVRSEGMS
YGMMITVQMDKKAEFDAIWNWAKTYMYQDSPTHPAFGYFAWSMRRDGVANDDM
PAPDGEEYFVTALYFAAARWGNGEGIFNYQQEADTILSRMRHRQVITGPTNRGVMT
ATNLFHPEEAQVRFTPDINNADHTDASYHLPSFYEIWARVAPQEDRAFWAKAADVS
RDYFAKAAHPVTALTPDYGNFDGTPWAASWRPESVDFRYDAWRSVMNWSMDYA
WWGKDSGAPARSDKLLAFFETQEGKMNHLYSLDGKPLGGGPTLGLISMNATAAMA
ATDPRWHNFVEKLWQQQPPTGQYRYYDGVLYLMALLHCAGEYKAWIPDGE

[0303] Cellulase Ce1DZ1 (EC 3.2.1.4) Thermoanaerobacterium sp

MNKWHINKWYFFVGMLVIFAVIISLILKDTSLTFSSYDREKFPHLIGNSMVKKPSLAG
RLKIIEIDGRKTLGDQHGNPIQLRGMSTHGLQWFPQIINNNAFSALSKDWEANVIRLA
MYVGEGGYSTDPSVKEKVIEGINLAIKNDMYVIVDWHILNPGDPNAKIYSGAKEFFK
EIASKYPNDLHIIYELANEPNPTESDITNDIAGWEKVKKYAEPIIKMLRDMGNENIIIVG
NPEWSTRPDLAVNDPIDDKNVMYSAHFYTGSASVWENGNKGHIARNIEKALENGLT
VFVTEWGTSEASGDGGPYLNEADEWLEFLNSNNISWVNWSLANKNEASAAFLPTTS
LDPGNGKVWAVNQLSLSGEYVRARIKGIPYKPISRETMGK

[0304] Cellulase Ce1DZ1 (EC 3.2.1.4) Thermoanaerobacterium sp

MNKWHINKWYFFVGMLVIFAVIISLILKDTSLTFSSYDREKFPHLIGNSMVKKPSLAG
RLKIIEIDGRKTLGDQHGNPIQLRGMSTHGLQWFPQIINNNAFSALSKDWEANVIRLA
MYVGEGGYSTDPSVKEKVIEGINLAIKNDMYVIVDWHILNPGDPNAKIYSGAKEFFK
EIASKYPNDLHIIYELANEPNPTESDITNDIAGWEKVKKYAEPIIKMLRDMGNENIIIVG
NPEWSTRPDLAVNDPIDDKNVMYSAHFYTGSASVWENGNKGHIARNIEKALENGLT
VFVTEWGTSEASGDGGPYLNEADEWLEFLNSNNISWVNWSLANKNEASAAFLPTTS
LDPGNGKVWAVNQLSLSGEYVRARIKGIPYKPISRETMGK

[0305] Endoglucanase E-2 (EC 3.2.1.4) (Cellulase E-2) (Cellulase E2) (Endo-1,4-beta-glucanase E-2) Thermobifida fusca (Thermomonospora fusca)

MSPRPLRALLGAAAAALVSAAALAFPSQAAANDSPFYVNPNMSSAEWVRNNPNDP
RTPVIRDRIASVPQGTWFAHHNPGQITGQVDALMSAAQAAGKIPILVVYNAPGRDCG
NHSSGGAPSHSAYRSWIDEFAAGLKNRPAYIIVEPDLISLMSSCMQHVQQEVLETMA
YAGKALKAGSSQARIYFDAGHSAWHSPAQMASWLQQADISNSAHGIATNTSNYRW
TADEVAYAKAVLSAIGNPSLRAVIDTSRNGNGPAGNEWCDPSGRAIGTPSTTNTGDP
MIDAFLWIKLPGEADGCIAGAGQFVPQAAYEMAIAAGGTNPNPNPNPTPTPTPTPTPP
PGSSGACTATYTIANEWNDGFQATVTVTANQNITGWTVTWTFTDGQTITNAWNAD
VSTSGSSVTARNVGHNGTLSQGASTEFGFVGSKGNSNSVPTLTCAAS

[0306] Endoglucanase E-4 (EC 3.2.1.4) (Cellulase E-4) (Cellulase E4) (Endo-1,4-beta-glucanase E-4) Thermobifida fusca (Thermomonospora fusca)

MSVTEPPPRRRGRHSRARRFLTSLGATAALTAGMLGVPLATGTAHAEPAFNYAEAL
QKSMFFYEAQRSGKLPENNRVSWRGDSGLNDGADVGLDLTGGWYDAGDHVKFGF
PMAFTATMLAWGAIESPEGYIRSGQMPYLKDNLRWVNDYFIKAHPSPNVLYVQVGD
GDADHKWWGPAEVMPMERPSFKVDPSCPGSDVAAETAAAMAASSIVFADDDPAYA
ATLVQHAKQLYTFADTYRGVYSDCVPAGAFYNSWSGYQDELVWGAYWLYKATGD
DSYLAKAEYEYDFLSTEQQTDLRSYRWTIAWDDKSYGTYVLLAKETGKQKYIDDAN
RWLDYWTVGVNGQRVPYSPGGMAVLDTWGALRYAANTAFVALVYAKVIDDPVR
KQRYHDFAVRQINYALGDNPRNSSYVVGFGNNPPRNPHHRTAHGSWTDSIASPAEN
RHVLYGALVGGPGSPNDAYTDDRQDYVANEVATDYNAGFSSALAMLVEEYGGTPL
ADFPPTEEPDGPEIFVEAQINTPGTTFTEIKAMIRNQSGWPARMLDKGTFRYWFTLDE
GVDPADITVSSAYNQCATPEDVHHVSGDLYYVEIDCTGEKIFPGGQSEHRREVQFRIA
GGPGWDPSNDWSFQGIGNELAPAPYIVLYDDGVPVWGTAPEEGEEPGGGEGPGGGE
EPGEDVTPPSAPGSPAVRDVTSTSAVLTWSASSDTGGSGVAGYDVFLRAGTGQEQK
VGSTTRTSFTLTGLEPDTTYIAAVVARDNAGNVSQRSTVSFTTLAENGGGPDASCTV
GYSTNDWDSGFTASIRITYHGTAPLSSWELSFTFPAGQQVTHGWNATWRQDGAAVT
ATPMSWNSSLAPGATVEVGFNGSWSGSNTPPTDFTLNGEPCALA

[0307] Endoglucanase E-5 (EC 3.2.1.4) (Cellulase E-5) (Cellulase E5) (Endo-1,4-beta-glucanase E-4) Thermobifida fusca (Thermomonospora fusca)

MAKSPAARKGXPPVAVAVTAALALLIALLSPGVAQAAGLTATVTKESSWDNGYSAS
VTVRNDTSSTVSQWEVVLTLPGGTTVAQVWNAQHTSSGNSHTFTGVSWNSTIPPGG
TASSGFIASGSGEPTHCTINGAPCDEGSEPGGPGGPGTPSPDPGTQPGTGTPVERYGK
VQVCGTQLCDEHGNPVQLRGMSTHGIQWFDHCLTDSSLDALAYDWKADIIRLSMYI
QEDGYETNPRGFTDRMHQLIDMATARGLYVIVDWHILTPGDPHYNLDRAKTFFAEI
AQRHASKTNVLYEIANEPNGVSWASIKSYAEEVIPVIRQRDPDSVIIVGTRGWSSLGV
SEGSGPAEIAANPVNASNIMYAFHFYAASHRDNYLNALREASELFPVFVTEFGTETYT
GDGANDFQMADRYIDLMAERKIGWTKWNYSDDFRSGAVFQPGTCASGGPWSGSSL
KASGQWVRSKLQS

[0308] Endoglucanase E-2 (EC 3.2.1.4) (Cellulase E-2) (Cellulase E2) (Endo-1,4-beta-glucanase E-2) Thermobifida fusca (Thermomonospora fusca)

MSPRPLRALLGAAAAALVSAAALAFPSQAAANDSPFYVNPNMSSAEWVRNNPNDP
RTPVIRDRIASVPQGTWFAHHNPGQITGQVDALMSAAQAAGKIPILVVYNAPGRDCG
NHSSGGAPSHSAYRSWIDEFAAGLKNRPAYIIVEPDLISLMSSCMQHVQQEVLETMA
YAGKALKAGSSQARIYFDAGHSAWHSPAQMASWLQQADISNSAHGIATNTSNYRW
TADEVAYAKAVLSAIGNPSLRAVIDTSRNGNGPAGNEWCDPSGRAIGTPSTTNTGDP
MIDAFLWIKLPGEADGCIAGAGQFVPQAAYEMAIAAGGTNPNPNPNPTPTPTPTPTPP
PGSSGACTATYTIANEWNDGFQATVTVTANQNITGWTVTWTFTDGQTITNAWNAD
VSTSGSSVTARNVGHNGTLSQGASTEFGFVGSKGNSNSVPTLTCAAS

[0309] Endoglucanase E-4 (EC 3.2.1.4) (Cellulase E-4) (Cellulase E4) (Endo-1,4-beta-glucanase E-4) Thermobifida fusca (Thermomonospora fusca)

MSVTEPPPRRRGRHSRARRFLTSLGATAALTAGMLGVPLATGTAHAEPAFNYAEAL
QKSMFFYEAQRSGKLPENNRVSWRGDSGLNDGADVGLDLTGGWYDAGDHVKFGF
PMAFTATMLAWGAIESPEGYIRSGQMPYLKDNLRWVNDYFIKAHPSPNVLYVQVGD
GDADHKWWGPAEVMPMERPSFKVDPSCPGSDVAAETAAAMAASSIVFADDDPAYA
ATLVQHAKQLYTFADTYRGVYSDCVPAGAFYNSWSGYQDELVWGAYWLYKATGD
DSYLAKAEYEYDFLSTEQQTDLRSYRWTIAWDDKSYGTYVLLAKETGKQKYIDDAN
RWLDYWTVGVNGQRVPYSPGGMAVLDTWGALRYAANTAFVALVYAKVIDDPVR
KQRYHDFAVRQINYALGDNPRNSSYVVGFGNNPPRNPHHRTAHGSWTDSIASPAEN
RHVLYGALVGGPGSPNDAYTDDRQDYVANEVATDYNAGFSSALAMLVEEYGGTPL
ADFPPTEEPDGPEIFVEAQINTPGTTFTEIKAMIRNQSGWPARMLDKGTFRYWFTLDE
GVDPADITVSSAYNQCATPEDVHHVSGDLYYVEIDCTGEKIFPGGQSEHRREVQFRIA
GGPGWDPSNDWSFQGIGNELAPAPYIVLYDDGVPVWGTAPEEGEEPGGGEGPGGGE
EPGEDVTPPSAPGSPAVRDVTSTSAVLTWSASSDTGGSGVAGYDVFLRAGTGQEQK
VGSTTRTSFTLTGLEPDTTYIAAVVARDNAGNVSQRSTVSFTTLAENGGGPDASCTV
GYSTNDWDSGFTASIRITYHGTAPLSSWELSFTFPAGQQVTHGWNATWRQDGAAVT
ATPMSWNSSLAPGATVEVGFNGSWSGSNTPPTDFTLNGEPCALA

[0310] Endoglucanase E-5 (EC 3.2.1.4) (Cellulase E-5) (Cellulase E5) (Endo-1,4-beta-glucanase E-4) Thermobifida fusca (Thermomonospora fusca)

MAKSPAARKGXPPVAVAVTAALALLIALLSPGVAQAAGLTATVTKESSWDNGYSAS
VTVRNDTSSTVSQWEVVLTLPGGTTVAQVWNAQHTSSGNSHTFTGVSWNSTIPPGG
TASSGFIASGSGEPTHCTINGAPCDEGSEPGGPGGPGTPSPDPGTQPGTGTPVERYGK
VQVCGTQLCDEHGNPVQLRGMSTHGIQWFDHCLTDSSLDALAYDWKADIIRLSMYI
QEDGYETNPRGFTDRMHQLIDMATARGLYVIVDWHILTPGDPHYNLDRAKTFFAEI
AQRHASKTNVLYEIANEPNGVSWASIKSYAEEVIPVIRQRDPDSVIIVGTRGWSSLGV
SEGSGPAEIAANPVNASNIMYAFHFYAASHRDNYLNALREASELFPVFVTEFGTETYT
GDGANDFQMADRYIDLMAERKIGWTKWNYSDDFRSGAVFQPGTCASGGPWSGSSL
KASGQWVRSKLQS

[0311] Thermostable celloxylanase (EC 3.2.1.4) (EC 3.2.1.8) Thermoclostridium stercorarium (Clostridium stercorarium)

MNKFLNKKWSLILTMGGIFLMATLSLIFATGKKAFNDQTSAEDIPSLAEAFRDYFPIG
AAIEPGYTTGQIAELYKKHVNMLVAENAMKPASLQPTEGNFQWADADRIVQFAKEN
GMELRFHTLVWHNQTPTGFSLDKEGKPMVEETDPQKREENRKLLLQRLENYIRAVV
LRYKDDIKSWDVVNEVIEPNDPGGMRNSPWYQITGTEYIEVAFRATREAGGSDIKLY
INDYNTDDPVKRDILYELVKNLLEKGVPIDGVGHQTHIDIYNPPVERIIESIKKFAGLG
LDNIITELDMSIYSWNDRSDYGDSIPDYILTLQAKRYQELFDALKENKDIVSAVVFWG
ISDKYSWLNGFPVKRTNAPLLFDRNFMPKPAFWAIVDPSRLRE

[0312] Thermostable celloxylanase (EC 3.2.1.4) (EC 3.2.1.8) Thermoclostridium stercorarium (Clostridium stercorarium)

MNKFLNKKWSLILTMGGIFLMATLSLIFATGKKAFNDQTSAEDIPSLAEAFRDYFPIG
AAIEPGYTTGQIAELYKKHVNMLVAENAMKPASLQPTEGNFQWADADRIVQFAKEN
GMELRFHTLVWHNQTPTGFSLDKEGKPMVEETDPQKREENRKLLLQRLENYIRAVV
LRYKDDIKSWDVVNEVIEPNDPGGMRNSPWYQITGTEYIEVAFRATREAGGSDIKLY
INDYNTDDPVKRDILYELVKNLLEKGVPIDGVGHQTHIDIYNPPVERIIESIKKFAGLG
LDNIITELDMSIYSWNDRSDYGDSIPDYILTLQAKRYQELFDALKENKDIVSAVVFWG
ISDKYSWLNGFPVKRTNAPLLFDRNFMPKPAFWAIVDPSRLRE

[0313] Cellulase (EC 3.2.1.4)Thermococcus sp. 2319x1

MNRQKALAMFVLFFVLVGVIGSIPASHATTDTSTYTTPTGIYYEVRGDTIYMINPSSG
EEVPIHLFGVNWFGFETPNYVVHGLWSRNWEDMLLQIKSLGFNAIRLPFCTQSVKPG
TMPTGIDYAKNPDLQGLDSVQIMEKIIKKAGDLGIFVLLDYHRIGCNFIEPLWYTDSF
SEQDYINTWVEVAQRFGKYWNVIGADLKNEPHSSSPAPAAYTDGSGATWGMGNNA
TDWNLAAERIGKAILEVAPHWLIFVEGTQFTTPEIDGSYEWGHNAWWGGNLMGVR
EYPVNLPRNKLVYSPHVYGPDVYDQPYFDPAEGFPDNLPDIWYHHFGYVKLDLGYP
VVIGEFGGKYGHGGDARDVTWQNKIIDWMIQNKFCDFFYWSWNPNSGDTGGILQD
DWTTIWEDKYNNLKRLMDSCSGNAIAPPVPTTTTSTTTTTTTQTPTTSTPTTTTTTTTT
TTTTPPGSIPFETVNILPTSSQYEGTSVEVVCDGTQCASSVWGAPNLWGVVKIGNAT
MDPNVWGWEDVYRTAPQDIGTGSTKMEIGNGVLKVTSLWNINMHPKYNTMAYHE
VIYGAKPWGNQPINAQNFVLPIQVSQLPRILVDTKYTLEKSFPGNNFAFEAWLFKDT
DNMRAPGQGDYEIMVQLYIEGGYPAGYDKGPVLTVDVPIIVDGKLVNQTFELYDVV
ADAGWRFLTFKSTKNYNGSEVVFDYTKFIEIVDGYLSGGNLTNHYLMSLEFGTEVYT
NGCSSFPCTVDVRWTLDKYRFILAPNTMTTEEAMSVLIGEVQPPASTTTSQTTTSTPT
PTTTTTAPPTTTPPAQDVIKIRYPDDGQWPEAPIDGDGDGNPEFYIEINPWNIQSAEGY
AEMTYNLSTGVLHYVQALDDITLKNGGSWVHGYPEIFYGNKPWNNNYATDGEVPL
PGKVSNLSNFYLSVSYKLLPKNGLPINFAIESWLTREPWRNSGINSDEQELMIWLYYD
GLQPAGSKVKEIIVPIVVNGTPVNATFEVWKANIGWEYIAFRIKTPIKEGTVTIPYGAF
ISAAANVTSLANYTELYLEDVEVGTEYGTPSTTSAHLEWWFYNVSLEYRPGEPLLSQ
PPAEGSAPSEGGQTPSEGGATTGTLDAKLVNSWGTGAQYEVAVNLDTSSTWKLLIKI
KDGKISDIWGATIVGTQGDYVVVQPSSPAASATVGFVTSGNAPLVEEAVLLSGDKVL
AMWTAPTASASDLNVTIKIDSEWDSGFVVKIYVTNNGNAPVSNWQIKLRMTSLISGI
WGGTYTVSGDVVTIVPTGSNAVINPGTTIEIGFVASKQGAYVYPELLGVEIL

[0314] Endoglucanase (EC 3.2.1.4) Thermogutta terrifontis

MWNIFAIMSIAVACAAACAQEPVTVLRWDFEEIVGEQNVQALPAEWIASSKEGIAVE
RTEQGGRCLHVWVDAATGPGSRNIRYRLPVDKLRGQRVRVNALVRAKGVSQPPKP
WNGIKCMLRIESGGEIQWPQQNLPGGDFDWRPIQFVVAVPDDCQQVDLIVGLENVT
GDAWFDNIAVEVIPKKKLSSNHKEVFKGHNLPRLRGAMIGPHVTNADLLEFGNVWK
ANHIRWQLIWNGFPHSPADSATLDEYRQWLDGALKRLEAALPVCREAGILVTVDLH
TPPGGRNEASECRIFHDREFQKAFIDIWEDIARRFADSDVVWGYDLVNEPVEGMVPD
GLMNWQRLAEETARRVRAIDQKHAIIIEPAPWGSPSSIALLDPIDVPGVVYSVHMYVP
HAFTHQGVYDNPVGIVYPGTIDGKWYDRNTLRKVLEPVRRFQEENGVHIYIGEFSAI
RWAPADSACQYLKDCIEIFEEYGWDWAYHAFREWDGWSVEHGPDRNDRNRTATPT
DRALLLRSWYAENVKPQFSDKKKD

[0315] Endo-1,4-beta-glucanase (EC 3.2.1.4) Thermotoga maritima

MVLMTKPGTSDFVWNGIPLSMELNLWNIKEYSGSVAMKFDGEKITFDADIQNLSPKE
PERYVLGYPEFYYGYKPWENHTAEGSKLPVPVSSMKSFSVEVSFDIHHEPSLPLNFA
METWLTREKYQTEASIGDVEIMVWFYFNNLTPGGEKIEEFTIPFVLNGESVEGTWEL
WLAEWGWDYLAFRLKDPVKKGRVKFDVRHFLDAAGKALSSSARVKDFEDLYFTV
WEIGTEFGSPETKSAQFGWKFENFSIDLEVRE

[0316] Endoglucanase M (EC 3.2.1.4) Thermotoga maritima (strain ATCC 43589/DSM 3109/JCM 10099/NBRC 100826/MSB8)

MKELIRKLTEAFGPSGREEEVRSIILEELEGHIDGHRIDGLGNLIVWKGSGEKKVILDA
HIDEIGVVVTNVDDKGFLTIEPVGGVSPYMLLGKRIRFENGTIGVVGMEGETTEERQE
NVRKLSFDKLFIDIGANSREEAQKMCPIGSFGVYDSGFVEVSGKYVSKAMDDRIGCA
VIVEVFKRIKPAVTLYGVFSVQEEVGLVGASVAGYGVPADEAIAIDVTDSADTPKAIK
RHAMRLSGGPALKVKDRASISSKRILENLIEIAEKFDIKYQMEVLTFGGTNAMGYQR
TREGIPSATVSIPTRYVHSPSEMIAPDDVEATVDLLIRYLGA

[0317] Major extracellular endoglucanase (EC 3.2.1.4) (Cellulase) (Endo-1,4-beta-glucanase) Xanthomonas campestris pv. campestris (strain ATCC 33913/DSM 3586/NCPPB 528/LM 568/P 25

MSIFRTASTLALATALALAAGPAFSYSINNSRQIVDDSGKVVQLKGVNVFGFETGNH
VMHGLWARNWKDMIVQMQGLGFNAVRLPFCPATLRSDTMPASIDYSRNADLQGLT
SLQILDKVIAEFNARGMYVLLDHHTPDCAGISELWYTGSYTEAQWLADLRFVANRY
KNVPYVLGLDLKNEPHGAATWGTGNAATDWNKAAERGSAAVLAVAPKWLIAVEG
ITDNPVCSTNGGIFWGGNLQPLACTPLNIPANRLLLAPHVYGPDVFVQSYFNDSNFPN
NMPAIWERHFGQFAGTHALLLGEFGGKYGEGDARDKTWQDALVKYLRSKGINQGF
YWSWNPNSGDTGGILRDDWTSVRQDKMTLLRTLWGTAGNTTPTPTPTPTPTPTPTPT
PTPTPTPGTSTFSTKVIVDNSWNGGYCNRVQVTNTGTASGTWSIAVPVTGTVNNAW
NATWSQSGSTLRASGVDENRTLAAGATAEFGFCAAS

[0318] Major extracellular endoglucanase (EC 3.2.1.4) (Cellulase) (Endo-1,4-beta-glucanase) Xanthomonas campestris pv. campestris (strain ATCC 33913/DSM 3586/NCPPB 528/LMG 568/P 25)

MSIFRTASTLALATALALAAGPAFSYSINNSRQIVDDSGKVVQLKGVNVFGFETGNH
VMHGLWARNWKDMIVQMQGLGFNAVRLPFCPATLRSDTMPASIDYSRNADLQGLT
SLQILDKVIAEFNARGMYVLLDHHTPDCAGISELWYTGSYTEAQWLADLRFVANRY
KNVPYVLGLDLKNEPHGAATWGTGNAATDWNKAAERGSAAVLAVAPKWLIAVEG
ITDNPVCSTNGGIFWGGNLQPLACTPLNIPANRLLLAPHVYGPDVFVQSYFNDSNFPN
NMPAIWERHFGQFAGTHALLLGEFGGKYGEGDARDKTWQDALVKYLRSKGINQGF
YWSWNPNSGDTGGILRDDWTSVRQDKMTLLRTLWGTAGNTTPTPTPTPTPTPTPTPT
PTPTPTPGTSTFSTKVIVDNSWNGGYCNRVQVTNTGTASGTWSIAVPVTGTVNNAW
NATWSQSGSTLRASGVDFNRTLAAGATAEFGFCAAS

[0319] Endoglucanase, family GH5 (EC 3.2.1.4) Zobellia galactanivorans (strain DSM 12802/CCUG 47099/CIP 106680/NCIMB 13871/Dsij)

MRKTVLIFMVLSVNFSLFTSCGEKEHSDGAHVSGDPDIREMSKEEGNEEDGEDDGN
MREIAPKEFVLDMGAGWNLGNAMDTYNSDETAWGNPLTTKAMIDEIAKMGFKTLR
LPVTWKFHIGEGPDYLIEANWLDKVEAIANFALENEMYVIINIHHDETWILPTYEKAD
EVKDELSKVWTQIANRFKTYGDYLIFETLNEPRHKGTPEEWKGGTQEGRDAVNQYH
QVSVDAIRATGGNNAKRKIMVSTYAASTASNALNDYLVPNGDKNVIVSVHSYFPYQ
FCLDGTDSTWGTEADKTALLAELDKIRDKFIVEDNRAVVMGEWGSTFSDNPEDRLA
HAEFYARACAERGICPIWWDNGNVDEFGIFNRNTLEWNYPEIAEAIVKETTEARSKA
KTE

[0320] Suitable exogenous or heterologous nucleic acid sequences encoding a protein with cellulase activity may also include nucleic acid sequences which can be derived as a result of the degenerate genetic code from the amino acid sequences identified above as well as functional equivalents with cellulase activity.

[0321] Suitable exogenous or heterologous nucleic acid sequences that that encode a protein with glucosidase activity, carbohydrase activity, glucanase activity, galactosidase activity, fructofuranosidase activity, mannanase activity, mannosidase activity, thioglucosidase activity, maltase activity, lactase activity, sucrase activity, hexosanase activity, pentosanase activity, fructosyltransferase activity, chitinase activity, or pectinase activity.

[0322] For the purposes of the present disclosure, heterologous carbohydrases and the transgenes that express them can be derived from a variety of organisms that natively express such enzymes, such as certain bacteria, cyanobacteria, fungi, algae, and other microbes or animals.

[0323] In certain aspects, the C. necator may be engineered to express one or more functional fragments of a carbohydrase. That is, the functional fragment is a polypeptide fragment of a protein that has at least 25%, e.g., at least 30%, at least 40%, at least 50%, at least 60%, at least 70%, at least 75%, at least 80%, at least 85%, at least 90%, at least 95%, at least 98%, at least 99%, or at least 100% of the activity of the corresponding mature, full-length polypeptide. The functional fragment can generally, but not always, be comprised of a continuous region of the protein, wherein the region has functioning carbohydrase activity.

[0324] An engineered strain of C. necator can express a carbohydrase alone or in combination with one or more of digestive enzyme, including but not limited to, other carbohydrase enzymes, a protease, a lipase, and/or a phytase.

### D. Lipase Enzymes

[0325] C. necator does not naturally produce significant amounts of digestive enzymes exhibiting lipase activity. Accordingly, the present disclosure provides for the introduction of nucleic acids encoding a lipase enzyme. Thus, the engineered C. necator of the present disclosure may be modified to express a lipase enzyme. Accordingly, various carbohydrase enzymes may be used in combination with the above-disclosed proteases and carbohydrases to provide a further engineered biosynthesis of digestive enzymes.

[0326] Suitable exogenous or heterologous nucleic acid sequences that encode a protein with lipase activity include, but are not limited to, a nucleic acid sequences that code for proteins or polypeptides having lipase activity with at least 50% identity or similarity (e.g., at least 60%, at least 70%, at least 80%, at least 90%, at least 95%, at least 96%, at least 97%, at least 98%, or at least 99%) at the amino acid level with the following sequences:

Acinetobacter baumannii (strain AYE) Lipase:
MKKTATALTLACSLLSVMSISQAQAADNIDVSFQTILQQERNWAGLQSKSLKVGDIT
WSYSEGGSSTKPTLLLIHGLAGSRDNWNRVAHYLTTNYHVIIPDLPGSGETIVSQDFD
YSVPNLAEKLRRFVEAANLKGPIHIAGHSLGGSIALLYAGQYPFETKSLFLVDSGGIFR
SANTIYLKDPTYLKQLLVSKKGDFNYLLKQTMFNPPFIPKEFLQAQEKLMINQAPQT
QKLVDQLIALNKVYTPDSFAVLTKTIDAPTLILWGKQDKIINVEVANELKRLLKNAQP
PVILENVGHMPILEAEQLVIQQYVPFLLKVETNQSSKTTTP
Aeribacillus pallidus Lipase:
MAVESRRPSVIRPGLFSVEAAADRRRREFDHHNEAILHKQVPIDVVFFGDSITHWWD
VSTYFGRSGRVVVNRGIGGDTSEYARRRFAADVLQLKPKYAVILIGVNNTWALDAW
HPEERRTAEQICEEVVADVESMLKAAHEHGIVPILCSILPTRIDRYARNEERNRLIVRI
NGGLKDLAGRLNVIYVDYHTALADADGVTLQEGLADDGLHPHVLGYDIMAAVLRE
TLAGHGIDL
Aeromonas hydrophila Lipase:
MKKKLIYAAVVSALLAGCGGSDDNKGDTSSYLDYLLTGSNAVGPSALAARAWDGT
LKFSTETADLSNPVSAMSTLDGWSTTQAIQIVPVTSSGITVQAPTTAEFGASVAPLYL
LEVTFDSTALRPSGVKKVLTYGVDFVVAASAWQAEPGSAQAVEPLPCLANDSGHRT
AERQSRRCLKAGSDYGNYKNNAGSNAQEQTINGLIALQEGLFKAATGIATDHVIFSD
WFGTQSGADVLVAVKGAAASVLKADPVTLDAAKLWKQDAWEHQPARHLYPGRD
RPTCLPDPAGCRAVPAAEQKDAIATAFGPVLRSTRLLKRPRSIPVPSSCLTSSPHRRPQ
VPGARPRPSPGTVPSQPVRHRQCAEGVTRSDRRAGGGGRGSGPAGDADCRSDPPER
AAGRGEQADWGDAHLRRQAAGRRAEHWSLQPAADAGRGAIRADACLRQGCPQHH
HGCHHLSARRDLGQRERLRPGAGPDLEDLCRHAGGQEGGAGGDRSSAARRAWLRL
SGSMDTVTTSDNPTPYLNLSYLTVARDNLKQSVAICWACVWRLAWPTPRAIGTAGS
LKVHFLGHSLGASRVPTCCGRQPDHRQRASGCPVQVRYRWPGHAGSHSAAAAELA
DFGPTIKMGVLTSGSAELKAGFTAYAPNCTDGGAYLLRQRVPAEPGRGHSATAATR
CRVQLCGPVGAGFG
Bacillus subtilis (strain 168) Lipase EstA:
[sequence omitted]
Burkholderia cepacia (Pseudomonas cepacia) Triacylglycerol lipase:
MARTMRSRVVAGAVACAMSIAPFAGTTAVMTLATTHAAMAATAPAAGYAATRYPI
ILVHGLSGTDKYAGVLEYWYGIQEDLQQNGATVYVANLSGFQSDDGPNGRGEQLL
AYVKTVLAATGATKVNLVGHSQGGLSSRYVAAVAPDLVASVTTIGTPHRGSEFADF
VQDVLAYDPTGLSSSVIAAFVNVFGILTSSSHNTNQDALAALQTLTTARAATYNQNY
PSAGLGAPGSCQTGAPTETVGGNTHLLYSWAGTAIQPTLSVFGVTGATDTSTLPLVD
PANVLDLSTLALFGTGTVMINRGSGQNDGLVSKCSALYGKVLSTSYKWNHLDEINQ
LLGVRGAYAEDPVAVIRTHANRLKLAGV
Clostridium novyi Liposomase:
MQSKLKKFISTISVSLFTLASVLTFSMAKPVNAFAKENQKVSQNNYPIILCHGCNGW
GRTENFGTVAFGARYYWGGNVDLQQKLIENGFTTYTAAVGPLSSNWDRACELYAQI
KGGRVDYGEAHAKKHGHSRYGRYYRGFYPEWGTKDENGNIRKVHLIGHSQGGQTI
RMLTTLLGQGKQEEISATGENTNELFKGGHDWVSGLITLASPHDGTTLADMKGTDA
AAAIGIGAVGSMLGNISNSDIIFDLKVDQWGLKRKPSESFISYFNRCATSKMWNSKDI
CSVDLSTNGAVEQNKWVKAQPNVYYFSWACCGTIRNPISIFGHHMASPIRMSDKGL
YNVQWALQAQLMGTYSRNNPRRAIPVIDSKWWPNDGYVNTISENGPKAGSTDEIVN
YNGTPQIGKWNFMGVKDMDHEDIIGRHWNGAPNFFIDMAQMLRNLPVTE
Geobacillus stearothermophilus (Bacillus stearothermophilus) Lipase:
MMKGCRVMVVLLGLWFVFGLSVPGGRTEAASPRANDAPIVLLHGFTGWGREEMLG
FKYWGGVRGDIEQWLNDNGYRTYTLAVGPLSSNWDRACEAYAQLVGGTVDYGAA
HAANDGHARFGRTYPGLLPELKRGGRVHIIAHSQGGQTARMLVSLLENGSQEEREY
AKEHNVSLSPLFEGGHRFVLSVTTIATPHDGTTLVNMVDFTDRFFDLQKAVLEAAAV
ASNAPYTSEIYDFKLDQWGLRREPGESFDHYFERLKRSPVWTSTDTARYDLSVPGAE
TLNRWVKASPNTYYLSFSTERTYRGALTGNYYPELGMNAFSAIVCAPFLGSYRNAA
LGIDSHWLGNDGIVNTISMNGPKRGSNDRIVPYDGTLKKGVWNDMGTYKVDHLEVI
GVDPNPSFNIRAFYLRLAEQLASLRP
Geobacillus zalihae Lipase:
MKCCRIMFVLLGLWFVFGLSVPGGRTEAASLRANDAPIVLLHGFTGWGREEMFGFK
YWGGVRGDIEQWLNDNGYRTYTLAVGPLSSNWDRACEAYAQLVGGTVDYGAAHA
AKHGHARFGRTYPGLLPELKRGGRIHIIAHSQGGQTARMLVSLLENGSQEEREYAKA
HNVSLSPLFEGGHHFVLSVTTIATPHDGTTLVNMVDFTDRFFDLQKAVLEAAAVASN
VPYTSQVYDFKLDQWGLRRQPGESFDHYFERLKRSPVWTSTDTARYDLSVSGAEKL
NQWVQASPNTYYLSFSTERTYRGALTGNHYPELGMNAFSAVVCAPFLGSYRNPTLG
IDDRWLENDGIVNTVSMNGPKRGSSDRIVPYDGTLKKGVWNDMGTYNVDHLEIIGV
DPNPSFDIRAFYLRLAEQLASLQP
Moraxella sp. (strain TA144) Lipase 2:
MPILPVPALNALLTKTIKTIKTGAAKNAHQHHVLHHTLKGLDNLPAPVLERINRRLK
ASTAEQYPLADAHLRLILAISNKLKRPLAIDKLPKLRQKFGTDAVSLQAPSVWQQNA
DASGSTENAVSWQDKTIANADGGDMTVRCYQKSTQNSERKSTDEAAMLFFHGGGF
CIGDIDTHHEFCHTVCAQTGWAVVSVDYRMAPEYPAPTALKDCLAAYAWLAEHSQ
SLGASPSRIVLSGDSAGGCLAALVAQQVIKPIDALWQDNNQAPAADKKVNDTFKNS
LADLPRPLAQLPLYPVTDYEAEYPSWELYGEGLLLDHNDAEVENSAYTQHSGLPQS
HPLISVMHGDNTQLCPSYIVVAELDILRDEGLAYAELLQKEGVQVQTYTVLGAPHGF
INLMSVHQGLGNQTTYIINEFACLVQNLLTSEGDKPNLRA
Mycobacterium tuberculosis (strain ATCC 25618/H37Rv) Triacylglycerol Lipase:
MVSYVVALPEVMSAAATDVASIGSVVATASQGVAGATTTVLAAAEDEVSAAIAALF
SGHGQDYQALSAQLA VFHERFVQALTGAAKGYAAAELANASLLQSEFASGIGNGFA
TIHQEIQRAPTALAAGFTQVPPFAAAQAGIFTGTPSGAAGFDIASLWPVKPLLSLSALE
THFAIPNNPLLALIASDIPPLSWFLGNSPPPLLNSLLGQTVQYTTYDGMSVVQITPAHP
TGEYVVAIHGGAFILPPSIFHWLNYSVTAYQTGATVQVPIYPLVQEGGTAGTVVPAM
AGLISTQIAQHGVSNVSVVGDSAGGNLALAAAQYMVSQGNPVPSSMVLLSPWLDV
GTWQISQAWAGNLAVNDPLVSPLYGSLNGLPPTYVYSGSLDPLAQQAVVLEHTAVV
QGAPFSFVLAPWQIHDWILLTPWGLLSWPQINQQLGIAA
Pelosinus fermentans DSM 17108 Lipase:
MNSYPIVLVHGFMGWGRNEVLGLKYWGGITDYEQELSSYGYTAYTATVGPVSSNW
DRACELYAYIKGGTVDYGHAHSTQKGHSRYGRTYPGLYPEWGNLTTEGKVNKIHL
VAHSMGGQTVRTLVQLLKEGSEEERNTTPSQLSSLFAGGKSWVHSITTIASPHDGTTL
ADGINIFGDFAKNLVASLASFTGAGEKLIYDFKLDQWGLNRKSGESLTDYTNRVENS
AIWNSTNDLANWDLSTDGARVLNQWVKAQSDIYYFSYSTCATVPSILTSNELPHVIY
MTPLLYPFGRFIGSYTRNEQGRVIIDNSWKPNDGVVNTISQNGPKIWSSDKIVNYNGV
PQIGKWNSMPLLDTIDHMDACGIGTNALTLSWYKGLAEKLSQLTISNLE
Photorhabdus luminescens (Xenorhabdus luminescens) Lipase 1:
MKRSFIFAPGMLALSISAISNAHAYNNLYVFGDSLSDGGNNGRYTVDGINGTESKLY
NDFIAQQLGIELVNSKKGGTNYAAGGATAVADLNNKHNTQDQVMGYLASHSNRAD
HNGMYVHWIGGNDVDAALRNPADAQKIITESAMAASSQVHALLNAGAGLVIVPTV
PDVGMTPKIMEFVLSKGGATSKDLAKIHAVVNGYPTIDKDTRLQVIHGVFKQIGSDV
SGGDAKKAEETTKQLIDGYNELSSNASKLVDNYNQLEDMALSQENGNIVRVDVNAL
LHEVIANPLRYGFLNTIGYACAQGVNAGSCRSKDTGFDASKPFLFADDFHPTPEAHHI
VSQYTVSVLNAPYRVMLLTNANNVPVKGALASLDGRLQQLRNVDNEQGKLGVFGG
YSGNHSHTLTLGSDYQIMDNILLGGMISRYQDNSSPADNFHYDGRGYVFTAYGLWR
YYDKGWISGDLHYLDMKYEDITRGIVLNDWLRKENASTSGHQWGGRITAGWDIPLT
SAVTTSPIIQYAWDKSYVKGYRESGNNSTAMHFGEQRYDSQVGTLGWRLDTNFGYF
NPYAEVRFNHQFGDKRYQIRSAINSTQTSFVSESQKQDTHWREYTIGMNAVITKDW
GAFASISRNDGDVQNHTYSFSLGVNASF
Proteus mirabilis Alpha/beta Hydrolase:
MSTKYPIVLVHGLAGFNEIVGFPYFYGIADALRQDGHQVFTASLSAFNSNEVRGKQL
WQFVQTLLQETQAKKVNFIGHSQGPLACRYVAANYPDSVASVTSINGVNHGSEIAD
LYRRIMRKDSIPEYIVEKVLNAFGTIISTESGHRGDPQDAIAALESLTTEQVTEFNNKY
PQALPKTPGGEGDEIVNGVHYYCFGSYIQGLIAGEKGNLLDPTHAAMRVLNTFFTEK
QNDGLVGRSSMRLGKLIKDDYAQDHIDMVNQVAGLVGYNEDIVAIYTQHAKYLAS
KQL
Pseudomonas aeruginosa (strain ATCC 15692/DSM 22644/CIP 104116/JCM 14847/
LMG 12228/1C/PRS101/Triacylglycerol Lipase:
PAO1)MKKKSLLPLGLAIGLASLAASPLIQASTYTQTKYPIVLAHGMLGFDNILGVDY
WFGIPSALRRDGAQVYVTEVSQLDTSEVRGEQLLQQVEEIVALSGQPKVNLIGHSHG
GPTIRYVAAVRPDLIASATSVGAPHKGSDTADFLRQIPPGSAGEAVLSGLVNSLGALI
SFLSSGSTGTQNSLGSLESLNSEGAARFNAKYPQGIPTSACGEGAYKVNGVSYYSWS
GSSPLTNFLDPSDAFLGASSLTFKNGTANDGLVGTCSSHLGMVIRDNYRMNHLDEV
NQVFGLTSLFETSPVSVYRQHANRLKNASL
Psychrobacter immobilis Lipase 1:
MLLKRLCFAALFSLSMVGCTNAPNALAVNTTQKIIQYERNKSDLEIKSLTLASGDKM
VYAENGNVAGEPLLLIHGFGGNKDNFTRIARQLEGYHLIIPDLLGFGESSKPMSADYR
SEAQRTRLHELLQAKGLASNIHVGGNSMGGAISVAYAAKYPKDVKSLWLVDSAGF
WSAGIPKSLEGATLENNPLLIKSNEDFYKMYDFVMYKPPYLPKSVKAVFAQERIKNK
ELDAKILEQIVTDNVEERAKIIAQYKIPTLVVWGDKDQIIKPETVNLIKKIIPQAQVIM
MEDVGHVPMVEALDETADNYKAFRSILEAQR
Serratia marcescens Extracellular Lipase:
MGIFSYKDLDENASKALFSDALAISTYAYHNIDNGFDEGYHQTGFGLGLPLTLITALI
GSTQSQGGLPGLPWNPDSEQAAQEAVNNAGWSVISATQLGYAGKTDARGTYYGET
AGYTTAQAEVLGKYDSEGNLTAIGISFRGTSGPRESLIGDTIGDVINDLLAGFGPKGY
ADGYTLKAFGNLLGDVAKFAQAHGLSGEDVVVSGHSLGGLAVNSMAAQSDANWG
GFYAQSNYVAFASPTQYEAGGKVINIGYENDPVFRALDGTSLTLPSLGVHDAPHTSA
TNNIVNFNDHYASDAWNLLPFSILNIPTWLSHLPFFYQDGLMRVLNSEFYSLTDKDST
IIVSNLSNVTRGNTWVEDLNRNAETHSGPTFIIGSDGNDLIKGGKGNDYLEGRDGDDI
FRDAGGYNLIAGGKGHNIFDTQQALKNTEVAYDGNTLYLRDAKGGITLADDISTLRS
KETSWLIFNKEVDHQVTAAGLKSDSGLKAYAAATGGDGDDVLQARSHDAWLFGN
AGNDTLIGHAGGNLTFVGGSGDDILKGVGNGNTFLFSGDFGRDQLYGFNASDKLVFI
GTEGASGNIRDYATQQNDDLVLAFGHSQVTLIGVSLDHISTDQVVLA
Staphylococcus aureus Lipase 2:
MLRGQEERKYSIRKYSIGVVSVLAATMFVVSSHEAQASEKTSTNAAAQKETLNQPG
EQGNAITSHQMQSGKQLDDMHKENGKSGTVTEGKDTLQSSKHQSTQNSKTIRTQND
NQVKQDSERQGSKQSHQNNATNNTERQNDQVQNTHHAERNGSQSTTSQSNDVDKS
QPSIPAQKVIPNHDKAAPTSTTPPSNDKTAPKSTKAQDATTDKHPNQQDTHQPAHQII
DAKQDDTVRQSEQKPQVGDLSKHIDGQNSPEKPTDKNTDNKQLIKDALQAPKTRST
TNAAADAKKVRPLKANQVQPLNKYPVVFVHGFLGLVGDNAPALYPNYWGGNKFK
VIEELRKQGYNVHQASVSAFGSNYDRAVELYYYIKGGRVDYGAAHAAKYGHERYG
KTYKGIMPNWEPGKKVHLVGHSMGGQTIRLMEEFLRNGNKEEIAYHKAHGGEISPL
FTGGHNNMVASITTLATPHNGSQAADKFGNTEAVRKIMFALNRFMGNKYSNIDLGL
TQWGFKQLPNESYIDYIKRVSKSKIWTSDDNAAYDLTLDGSAKLNNMTSMNPNITY
TTYTGVSSHTGPLGYENPDLGTFFLMATTSRIIGHDAREEWRKNDGVVPVISSLHPSN
QPFVNVTNDEPATRRGIWQVKPIIQGWDHVDFIGVDFLDFKRKGAELANFYTGIIND
LLRVEATESKGTQLKAS
Streptomyces coelicolor (strain ATCC BAA-471/A3(2)/M145) Lipase 2:
MPKPALRRVMTATVAAVGTLALGLTDATAHAAPAQATPTLDYVALGDSYSAGSGV
LPVDPANLLCLRSTANYPHVIADTTGARLTDVTCGAAQTADFTRAQYPGVAPQLDA
LGTGTDLVTLTIGGNDNSTFINAITACGTAGVLSGGKGSPCKDRHGTSFDDEIEANTY
PALKEALLGVRARAPHARVAALGYPWITPATADPSCFLKLPLAAGDVPYLRAIQAHL
NDAVRRAAEETGATYVDFSGVSDGHDACEAPGTRWIEPLLFGHSLVPVHPNALGER
RMAEHTMDVLGLD
Vibrio cholerae serotype 01 (strain ATCC 39315/E1 Tor Inaba N16961) )
Triacylglycerol Lipase:
MNKIIILIALSLFSSSIWAGTSAHALSQQGYTQTRYPIVLVHGLFGFDTLAGMDYFHGI
PQSLTRDGAQVYVAQVSATNSSERRGEQLLAQVESLLAVTGAKKVNLIGHSHGGPTI
RYVASVRPDLVASVTSIGGVHKGSAVADLVRGVIPSGSVSEQVAVGLTQGLVALIDL
LSGGKAHPQDPLASLAALTTEGSLKFNQYYPEGVPTSACGEGAYQVNGVRYYSWSG
AATVTNILDPSDVAMGLIGLVFNEPNDGLVATCSTHLGKVIRDDYRMNHLDEINGLL
GIHSLFETDPVTLYRQHANRLKQAGL
Cupriavidus metallidurans (strain ATCC 43123/DSM 2839/NBRC 102507/CH34)
(Ralstonia metallidurans)) Triacylglycerol Lipase:
MEHGNRRGPGRACAHQDTVTLKAGTRRSTSAIARTAAGTAAAIAAAIAMAWPASA
TASSDYAKTRYPIVLVHGLTGAAKMGGVIDYWYGIPEVLRANGATVYVSTVPSENS
DEERALALQAYVRAVKLETGADKVNLIGHSQGGPTSRMLAAMSPQDVASVTTIGSP
HRGSQLADVVLDVINGISSIPLAGPALVNVIQGVTNLLGWFNGLENGQALNQDAIAS
ARTLTSQGATEQNARLNATLAPGSQSALGPDCDTPGAVAEQRQGRDASGKLVTYTQ
AAYSWTGRGGPINLLRSNLLDPSTAAMAAAAGVMGMKGAGPNDGMVSVCSAKWG
RVLSTDYYWNHLDEINQMLGMYQDVDPRTVILNHANRLRNDQL
Cupriavidus necator (strain ATCC 17699/DSM 428/KCTC 22496/NCIMB 10442/
H16/Stanier 337) (Ralstonia eutropha) Triacylglycerol Lipase:
MEHSGHHACGRRTPALREQKAGKALRRLAGTATLVAAAMLAQPAPALAASGDYA
KTRYPIVLVHGLTGAARMGGVLDYWYGIPEVLRANGAQVYVATVPSFNSDEERAL
ALQAYVRAVKLESGADKVNLIGHSQGGPTSRMLAAMSPQDVASVTTIGSPHRGSEV
ADTVLDLINGVNSIPIAGPVLVGIIQGVLDTVGWFNGIGNGQALDQDALASLKILTTR
GAAEQNARLDATLVPGTKSALGPDCNTAGAVSEQRQARDAAGNFVTHTQAAYSWT
GQGGPFSLLRSNLLDPTTVMMSASAGLMDLKGAGPNDGLVSVCSSKWGRVLATGY
YWNHLDEVNQMAGLYQDVDPRTVILSHANRLRNDQL
Cupriavidus taiwanensis (strain DSM 17343/BCRC 17206/CCUG 44338/CIP
107171/LMG 19424/R1) (Ralstonia taiwanensis (strain LMG 19424)) Triacylglycerol
Lipase Putative:
MEHGENHACGPRTPVSRPQQSPNPLHRLAGAAAALAAAAMLAQPVPAAAALTANG
DYAKTRYPIVLVHGLTGAAKMAGVLDYWYGIPEVLRDHGAQVYVATVPSFNSDAE
RALALQAYVRAVKLETGADKVNLIGHSQGGPTARVLAAMSPQDVASVTTIGSPHRG
SEVADTVLDLINGIGAIPIAGPVLVSLIQGVFDTVGWFNGISNGQALDQDALASLESLT
TRGAAGQNARLDATLVPGTKSALGPDCDSPGAVSEQRQARDAAGNLVTHRQAAYS
WTGQGGPLSLLRSNLLDPSTVMMSTSGRLMALKGAGANDGLVSVCSSKWGRVLAT
GYYWNHLDEVNQMAGLYQDADPRTVILNHANRLRNDQL
Clostridium butyricum Lipase:
MNDKRIYFRIRNIIIFTLLMNMIFIFNIMKTKILCYIIGIIVLLIYLYINIIPLRLKKLNKRV
CIMVSGYELIADSSLAVLIEIILYIFLLNTDNLTINSKEFIINGITAVCVLIIPVINGFMRM
MFTSRNLGIVNRLLIVLLWWAPILNFIILNGCCKKVRYEYFYEQSKELRNDVRKENE
VCRTRYPIVMVHGIFFRDWMFINYWGRIPKELMRNGAQIFYGKQQSSNAVCKSAQE
LKENILKIINDTGCEKVNIIAHSKGGLDSRYAISCLGLSKYVASLTTVNTPHRGCKYV
DFLLDKAPDKFKNYVAKKYNRTFVKLGDKNPDFLAGVADLTLEKCSQFNIKVKDVE
GVLYQSVTSKMKNMFSSGFPLNIGYILAKIFDGENDGLVEVSSAKWGNFLGTLTAGK
KGISHGDMVDLTRQDIRGYDVCEFYVDLVRKLKEKGN
Candida albicans (strain SC5314/ATCC MYA-2876) (Yeast) Lipase 4:
MLFLLFLLVAPIYAGLILPTKPSNDPFYNAPAGFEKAAVGEILQSRKTPKPITGVFVPV
KIQNSWQLLVRSEDSFGNPNVIVTTVMEPFNADPSKLASYQVFEDSAKADCAPSYAL
QFGSDVTTIATQVETYLLAPLLDQGYYVVSPDYEGPKSTFTVGKQSGQAVLNSIRAA
LKSGKITNLAEDAKVVMWGYSGGSLASGWAAALQPNYAPELGGNLLGAALGGFVT
NITATAEATDGTVFAGIMANALGGVANEYPEFKQILQNDTDKQSVFDQFDNHCLAD
GVINYIGKHFLSGTNKIFKSGWNILKNPTISKIVEDNGLVYQKQLVPKIPILIYHGAIDQ
IVPIVNVKKTYQNWCDAGIASLEFSEDATNGHITETIVGAPVALTWIINRFNGKQTVS
GCQHVKRTSNFEYPNIPPSILNYFKAALNILIQKGLGPDIQKDQVNPDGLKKIPILV
Aspergillus niger (strain ATCC MYA-4892/CBS 513.88/FGSC A1513) Putative
Lipase atg 15:
MKGLRGHNKKSFWGNTRLSDLLWPVTLLPGLISAYQPVYLGSRQSSPFLPPQIPLGDS
PPLSDTHEFTLRHIFHRGTYQDPDLHRRLDITPDTRLRAVSDAGIESDVVTPNTPLVAS
SQPLIIERLADRRLSVIEEHLVTARSSGSAVALSPSDWVMDTLPGPNVTEKKTVVALA
MMTANDYIEVPGTGDWQDIHGRFNHSGSFGWQGDGLRGHVYADKINSTVVISLKG
TSPALFDGEGTTTNDKINDNLFFSCCCGQGGSYLWRQVCDCQTTLYNANLTCIVEA
MLDENRYYRASLDLYSNITEMYPNANVWLTGHSLGGAVSSLLGLTFGVPVVTFEAV
PEALPAARLGLPSPPGHDSRYPQSRRNTGSYHFGHTADPVYMGTCNGVSSVCTWGG
YAMESACHTGQMCVYDTVEDKGWRVGLSKHRINYVIANVLAGYDDVPPCAPEEEC
YDCELWKFFRSNGSEITTTTSATSTSTSTTTSRTSTCKTPGWWGCLDQTTTTETTSTST
STSTCKTPGWFGCKDPTTTSDITSVPTITTTEPPMTSTTTCKTPGWFGCKDETTTQVIA
PAATLTITEPPVTSTTTGKHLGRF
Diutina rugosa (Yeast) (Candida rugosa) Lipase 1:
MELALALSLIASVAAAPTATLANGDTITGLNAIINEAFLGIPFAEPPVGNLRFKDPVPY
SGSLDGQKFTSYGPSCMQQNPEGTYEENLPKAALDLVMQSKVFEAVSPSSEDCLTIN
VVRPPGTKAGANLPVMLWIFGGGFEVGGTSTFPPAQMITKSIAMGKPIIHVSVNYRV
SSWGFLAGDEIKAEGSANAGLKDQRLGMQWVADNIAAFGGDPTKVTIFGESAGSMS
VMCHILWNDGDNTYKGKPLFRAGIMQSGAMVPSDAVDGIYGNEIFDLLASNAGCGS
ASDKLACLRGVSSDTLEDATNNTPGFLAYSSLRLSYLPRPDGVNITDDMYALVREGK
YANIPVIIGDQNDEGTFFGTSSLNVTTDAQAREYFKQSFVHASDAEIDTLMTAYPGDI
TQGSPFDTGILNALTPQFKRISAVLGDLGFTLARRYFLNHYTGGTKYSFLSKQLSGLP
VLGTFHSNDIVFQDYLLGSGSLIYNNAFIAFATDLDPNTAGLLVKWPEYTSSSQSGNN
LMMINALGLYTGKDNFRTAGYDALFSNPPSFFV
Pseudozyma antarctica (Yeast) (Candida antarctica) Lipase
BMKLLSLTGVAGVLATCVAATPLVKRLPSGSDPAFSQPKSVLDAGLTCQGASPSSVS
KPILLVPGTGTTGPQSFDSNWIPLSTQLGYTPCWISPPPFMLNDTQVNTEYMVNAITA
LYAGSGNNKLPVLTWSQGGLVAQWGLTFFPSIRSKVDRLMAFAPDYKGTVLAGPLD
ALAVSAPSVWQQTTGSALTTALRNAGGLTQIVPTTNLYSATDEIVQPQVSNSPLDSS
YLFNGKNVQAQAVCGPLFVIDHAGSLTSQFSYVVGRSALRSTTGQARSADYGITDCN
PLPANDLTPEQKVAAAALLAPAAAAIVAGPKQNCEPDLMPYARPFAVGKRTCSGIVT
P
Saccharomyces cerevisiae (strain ATCC 204508/S288c) (Baker's yeast)
Triacylglycerol Lipase 3:
MKETAQEYKVSAVIPTLLKNWILRVVYATLDHIPPFVWEILHVITDIYFFWVQKLINY
VRPHSRVIYYNAIKKLDECDTYQMWCQQASVVDEITGANLWRRNFFSRRYDENSVI
EQYSILENMLREEKYDVVKEKFSTTGPCMLRNFAGIGDKKLFTKSLMGTKLLIEQYL
TRILEGLDILNNQTLTPTSFFQRCKLSLGTTALILQGGSLFGLFHLGVIRGLLLQDLMP
NIISGSSMGACVASLFGCLSNEQLKQLLTDDNLLNIIKNDVDLLKSCGYGNLEQHLNL
GTLIQNLIHHGYSQDVYLFIRFVMKYIVKEKTFEEVYQITGKVFNIVIHPTDKSCPNLL
NYVTTPNVLIKSAIECSLGSGVISEDTSLLCKNLENEIEPFLNINKNKQVKFLTPENAN
NPSITESPYTRLTELFNVNNFIVSLARPYLAPLVVNDLKHEIKTSKYYYYKHYPNMPPI
NANTVRKTQRSSSQSPIKAGTVEDLEPEPLMSPVPPSSAVNDSAEYIIPELGIPQLNFTE
MEPLAFKFKYHLERKLKNIATMEFRHRMEVLDNLGLLCSLIKRLIIDEKTPRSATEIA
VVPRMKSLSLTRIIEGQLNNIPYWIKSGERSTWPALALIKTRCAVEFKLDDIIRARRSR
Yarrowia lipolytica (strain CLIB 122/E 150) (Yeast) (Candida lipolytica) Lipase:
MSVTSTSLNGTFNGISEDGIEIFKGIKYANIPYRWAYAERIDDYDNGVEDCTQEGMAC
PQVLPFDYNIEKGPKEMPFDEFECSNLMITRPQGATNLPVFVWIHGGGNLAGNGYCS
DHNPVPFVKHSIVAGRPVLHVMIEYRLSAFGYLAVPDTNGNWVGNWGARDQYTAL
QWISKHIVEFGGDPSQITIGGESAGSIGLHALMVHESMKPKEECIIHNVILSSGTMDRM
GTGTISENAFKPIYDGIKTLVGDINTCSADELLEAQIKAGLDLGFYLQDDFFPPDWRN
VRFKVSRVLLSDVIVDGTNFKNKINPAVRVTPENDFDHKVFKLYNISTEDTWEDYHY
KMMLFKGDETFIRGNQQLELLFEQENIPVWRQLFDQIHPNDPSRLCHHAVDLYYMW
DNWEMPEDKHAVARQYQDTLTKFVYGQDPWPVDKLHYVHDNQFEILDKSQFGDF
RNVPALKFLLGFSAEELGELTKKYTGEGHYTL

[0327] Suitable exogenous or heterologous nucleic acid sequences encoding a protein with lipase activity may also include nucleic acid sequences which can be derived as a result of the degenerate genetic code from the amino acid sequences identified above as well as functional equivalents with lipase activity.

[0328] For the purposes of the present disclosure, heterologous lipases and the transgenes that express them can be derived from a variety of organisms that natively express such enzymes, such as certain bacteria, cyanobacteria, fungi, algae, and other microbes or animals.

[0329] In certain aspects, the C. necator may be engineered to express one or more functional fragments of a lipase. That is, the functional fragment is a polypeptide fragment of a protein that has at least 25%, e.g., at least 30%, at least 40%, at least 50%, at least 60%, at least 70%, at least 75%, at least 80%, at least 85%, at least 90%, at least 95%, at least 98%, at least 99%, or at least 100% of the activity of the corresponding mature, full-length polypeptide. The functional fragment can generally, but not always, be comprised of a continuous region of the protein, wherein the region has functioning lipase activity.

[0330] An engineered strain of C. necator can express a lipase alone or in combination with one or more of digestive enzyme, including but not limited to, other lipase enzymes, a protease, a carbohydrase, and/or a phytase.

### E. Phytase Enzymes

[0331] C. necator does not naturally produce significant amounts of digestive enzymes exhibiting phytase activity sufficient to catalyze phytic acid. Accordingly, the present disclosure provides for the introduction of nucleic acids encoding a phytase enzyme. In the context of a single cell protein product, for example, in the use of animal feed produces, may have a significant beneficial effect on the performance of an animal, including improving one or more of the following: feed conversion ratio (FCR), ability to digest a raw material (e.g. nutrient digestibility, such as amino acid digestibility), nitrogen retention, survival, carcass yield, growth rate, weight gain, feed efficiency animals resistance to necrotic enteritis, immune response of the subject, the growth of beneficial bacteria in the gastrointestinal tract of a subject.

[0332] Thus, the engineered C. necator of the present disclosure may be modified to express a phytase enzyme.

[0333] Suitable exogenous or heterologous nucleic acid sequences that encode a protein with phytase activity include, but are not limited to, a nucleic acid sequences that code for proteins or polypeptides having phytase activity with at least 50% identity or similarity (e.g., at least 60%, at least 70%, at least 80%, at least 90%, at least 95%, at least 96%, at least 97%, at least 98%, or at least 99%) at the amino acid level with the following sequences:

Bacillus sp. DS11 3-phytase:
MNHSKTLLLTAAAGLMLTCGAVSSQAKHKLSDPYHFTVNAAAETEPVDTAGDAAD
DPAIWLDPKNPQNSKLITTNKKSGLAVYSLEGKMLHSYHTGKLNNVDIRYDFPLNG
KKVDIAAASNRSEGKNTIEIYAIDGKNGTLQSITDPNRPIASAIDEVYGFSLYHSQKTG
KYYAMVTGKEGEFEQYELNADKNGYISGKKVRAFKMNSQTEGMAADDEYGSLYIA
EEDEAIWKFSAEPDGGSNGTVIDRADGRHLTPDIEGLTIYYAADGKGYLLASSQGNS
SYAIYERQGQNKYVADFQITDGPETDGTSDTDGIDVLGFGLGPEYPFGLFVAQDGENI
DHGQKANQNFKMVPWERIADKIGFHPQVNKQVDPRKMTDRSGK
Bacillus licheniformis β propeller phytase:
MNFYKTLALSTLAASLLSPSWSILPRAEASAYKDFSVTADAETEPVDTPDDAADDPAI
WVHPKQPEKSRLITTNKKSGLIVYDLNGKQLAAYPFGKLNNVDLRYNFPLDGKKIDI
AGASNRSDGKNTVEIYAFDGEKNKLKNIVNPQKPIQTDIEEVYGFSLYHSQKTGKFY
AMVTGKNVEFEQYELFDNGKGQVEGKKVRSFKMSSQTEGLAADDEYGKMYIAEED
AAIWSFSAEPNGGDKGKIVDRAGGTHLTADIEGLTIYYGEDGEGYLIASSQGDNRYAI
YDRRGKNDYVTDFSIDDGKEIDGTSDTDGIDVIGFGLGKKYPYGIFVAQDGENTENG
QPANQNFKIVSWEKIADALDDKPDIDDQVNPRKLKKRAK
Citrobacter braakii phytase:
MSTFIIRLLIFSLLCGSFSIHAEEQNGMKLERVVIVSRHGVRAPTKFTPIMKDVTPDQW
PQWDVPLGWLTPRGGELVSELGQYQRLWFTSKGLLNNQTCPSPGQVAVIADTDQRT
RKTGEAFLAGLAPKCQIQVHYQKDEEKNDPLFNPVKMGKCSFNTLKVKNAILERAG
GNIELYTQRYQSSFRTLENVLNFSQSETCKTTEKSTKCTLPEALPSEFKVTPDNVSLPG
AWSLSSTLTEIFLLQEAQGMPQVAWGRITGEKEWRDLLSLHNAQFDLLQRTPEVARS
RATPLLDMIDTALLTNGTTENRYGIKLPVSLLFIAGHDTNLANLSGALDLKWSLPGQP
DNTPPGGELVFEKWKRTSDNTDWVQVSFVYQTLRDMRDIQPLSLEKPAGKVDLKLI
ACEEKNSQGMCSLKSFSRLIKEIRVPECAVTE
Escherichia coli phytase:
MKAILIPFLSLLIPLTPQSAFAQSEPELKLESVVIVSRHGVRAPTKATQLMQDVTPDA
WPTWPVKLGWLTPRGGELIAYLGHYQRQRLVADGLLAKKGCPQSGQVAIIADVDE
RTRKTGEAFAAGLAPDCAITVHTQADTSSPDPLFNPLKTGVCQLDNANVTDAILSRA
GGSIADFTGHRQTAFRELERVLNFPQSNLCLKREKQDESCSLTQALPSELKVSADNVS
LTGAVSLASMLTEIFLLQQAQGMPEPGWGRITDSHQWNTLLSLHNAQFYLLQRTPEV
ARSRATPLLDLIKTALTPHPPQKQAYGVTLPTSVLFIAGHDTNLANLGGALELNWTL
PGQPDNTPPGGELVFERWRRLSDNSQWIQVSLVFQTLQQMRDKTPLSLNTPPGEVKL
TLAGCEERNAQGMCSLAGFTQIVNEARIPACSL

[0334] Suitable exogenous or heterologous nucleic acid sequences encoding a protein with phytase activity may also include nucleic acid sequences which can be derived as a result of the degenerate genetic code from the amino acid sequences identified above as well as functional equivalents with phytase activity.

[0335] For the purposes of the present disclosure, heterologous phytases and the transgenes that express them can be derived from a variety of organisms that natively express such enzymes, such as certain bacteria, cyanobacteria, fungi, algae, and other microbes or animals.

[0336] In certain aspects, the C. necator may be engineered to express one or more functional fragments of a phytase. That is, the functional fragment is a polypeptide fragment of a protein that has at least 25%, e.g., at least 30%, at least 40%, at least 50%, at least 60%, at least 70%, at least 75%, at least 80%, at least 85%, at least 90%, at least 95%, at least 98%, at least 99%, or at least 100% of the activity of the corresponding mature, full-length polypeptide. The functional fragment can generally, but not always, be comprised of a continuous region of the protein, wherein the region has functioning phytase activity.

[0337] An engineered strain of C. necator can express a phytase alone or in combination with one or more of digestive enzyme, including but not limited to, other phytase enzymes, a protease, a lipase, and/or a carbohydrase.

### F. Expression of Transgenes

[0338] The nucleic acid sequences (e.g., transgenes) that are transfected or otherwise incorporated into the engineered C. necator of the present disclosure can be incorporated into an expression cassette. In doing so, the nucleic acid sequences that encode a protease, carbohydrase, lipase, and/or phytase can be operably linked with one or more regulatory signals for initiating, inducing, or enhancing gene expression. These regulatory sequences are intended to make possible the specific expression of the genes and proteins and may be referred to as a “gene construct.” The gene construct may also comprise one or more enhancer sequences in operable linkage with the promoter, which make possible an enhanced expression of the nucleic acid sequence. Additional advantageous sequences, such as further regulatory elements or terminator sequences, may also be inserted at the 3′ end of the DNA sequences. The transgenes may be present in one or more copies of the expression cassette (or gene construct).

[0339] The regulatory sequences or factors preferably have a positive influence on the gene expression of the introduced genes and thereby increase expression. The regulatory elements can advantageously be strengthened at the transcription level by using strong transcription signals such as promoters and/or enhancers.

[0340] For the purposes of the present disclosure, an expression cassette or expression vector may comprise one transgene encoding a protease, carbohydrase, lipase, or phytase or other enzyme. Alternatively, the expression cassette or expression vector may comprise multiple transgenes encoding a combination of proteases, carbohydrases, lipases, or phytases, or other enzymes.

[0341] Various methods can be used to introduce an expression vector into the C. necator.

[0342] Such methods are generally described in Sambrook et ah, Molecular Cloning: A Laboratory Manual, Cold Springs Harbor Laboratory, New York (1989, 1992), in Ausubel et ah, Current Protocols in Molecular Biology, John Wiley and Sons, Baltimore, Md. (1989), Chang et ah, Somatic Gene Therapy, CRC Press, Ann Arbor, Mich. (1995), Vega et ah, Gene Targeting, CRC Press, Ann Arbor Mich. (1995), Vectors: A Survey of Molecular Cloning Vectors and Their Uses, Butterworths, Boston Mass. (1988) and Gilboa et at. [Biotechniques 4 (6): 504-512, 1986] and include, for example, stable or transient transfection, lipofection, electroporation, and infection with recombinant viral vectors. Stable expression of transgenes can also be achieved, for example, using CRISPR-based systems, TALON, or zinc finger nucleases.

### VII. Single Cell Protein and Uses Thereof

[0343] The present disclosure provides edible products, food, and others products, such as single cell protein products, that include protein derived from the engineered C. necator bacterium provided herein. Additionally provided are methods for producing amino acids, digestive enzymes proteins, and other biological nutrients using the engineered C. necator described herein.

[0344] Current single cell protein (SCP) products are largely lacking in desirable digestive enzymes. The engineered C. necator disclosed herein can be utilized in methods of preparing a SCP product that includes desirable digestive enzymes and does not require further fortification. The methods may comprise culturing an engineered strain of C. necator, thereby creating biomass comprising protein and digestive enzymes. The methods may also comprise isolating the C. necator or the biomass, and preparing a single-cell protein product from the C. necator or the biomass. The protein-rich biomass may be used as a single cell protein (SCP) product. The biomass may be utilized as an edible product, for instance, an animal feed or human food.

[0345] In some embodiments, the animal feed is a fish feed, a livestock or ruminant feed, a swine feed, goat feed, llama feed, turkey feed, a poultry feed, a rodent feed, a dog feed, and a cat feed. The animal feed may be a livestock feed or a domesticated animal feed. In yet other aspects, the human food is a yogurt, a smoothie, a bread product, a pasta product, a nutritional bar, a chip or cracker, a plant-based meat substitute, a cheese, a plant-based cheese, and a powdered nutritional supplement.

[0346] One of the major challenges in utilizing biosystems for food production is obtaining the proper dietary balance between the quantities of protein, carbohydrate, and fat. The microbial systems generally considered for food synthesis tend to produce biomass disproportionately high in protein and digestive enzymes. The engineered C. necator strains of the present disclosure can be used to produce a SCP product with a higher proportion of digestive enzymes, particularly, proteases, carbohydrases, lipases, and/or phytases. Thus, the present disclosure provides food products, including human foods and animal feeds comprising a SCP produced from or including the engineered C. necator described herein.

[0347] A SCP product, “protein product,” or “microbial protein product” (e.g., one or more of single cell protein, cell lysate, protein concentrate, protein isolate, protein extract, protein hydrolysate, free amino acids, peptides, oligopeptides, or combinations thereof), derived from one or more engineered C. necator strains described herein, may be processed or incorporated into an edible food composition for human and/or animal consumption, a cosmetic, a pharmaceutical product, or a fertilizer.

[0348] A food composition (i.e., food product) may be, for example, a food item, a food ingredient, a nutritional product, an animal feed, and/or a pet food product. In some embodiments, the food composition may contain any of at least about 15%, at least about 20%, at least about 25%, at least about 30%, at least about 35%, at least about 40%, at least about 45%, at least about 50%, at least about 55%, at least about 60%, at least about 65%, at least about 70%, at least about 75%, at least about 80%, at least about 85%, at least about 90%, at least about 95%, or up to 100% microbial protein product by weight, e.g., by weight on a dry weight basis.

[0349] A cosmetic or pharmaceutical composition may contain any of at least about 0.01%, at least about 0.05%, at least about 0.1%, at least about 0.5%, at least about 1%, at least about 2%, at least about 3%, at least about 4%, at least about 5%, at least about 10%, at least about 15%, at least about 20%, at least about 25%, at least about 30%, at least about 35%, at least about 40%, at least about 45%, at least about 50%, at least about 55%, at least about 60%, at least about 65%, at least about 70%, at least about 75%, at least about 80%, at least about 85%, at least about 90%, at least about 95%, or up to 100% microbial protein product by weight, e.g., by weight on a dry weight basis.

[0350] A fertilizer may contain any of at least about 0.5%, at least about 1%, at least about 2%, at least about 3%, at least about 4%, at least about 5%, at least about 10%, at least about 15%, at least about 20%, at least about 25%, at least about 30%, at least about 35%, at least about 40%, at least about 45%, at least about 50%, at least about 55%, at least about 60%, at least about 65%, at least about 70%, at least about 75%, at least about 80%, at least about 85%, at least about 90%, at least about 95%, or up to 100% microbial protein product by weight, e.g., by weight on a dry weight basis.

[0351] The biomass that is produced from culturing the engineered C. necator strains disclosed herein results in a desirable protein and digestive content. The biomass can have a protein content higher than or at least about any of about 40%, about 50%, about 60%, about 70%, about 80%, about 90%, or about 95% by weight, and a fat content of about 60%, about 50%, about 40%, about 30%, about 20%, about 15%, about 10%, or about 5% by weight.

[0352] The biomass or an SCP product created therefrom may comprise free amino acids, polypeptides, proteins, and/or digestive enzymes. In some embodiments, an SCP product derived from the engineered C. necator strains disclosed herein comprises an increased digestive enzyme content relative to an SCP product derived from a wild type or naturally occurring strain of C. necator. For instance, the SCP product comprises about 0.25 wt % to about 25 wt %, about 0.5 wt % to about 25 wt %, about 1 wt % to about 25 wt %, about 5 wt % to about 25 wt %, about 10 wt % to about 25 wt %, about 15 wt % to about 25 wt %, about 20 wt % to about 25 wt %, about 0.5 wt % to about 20 wt %, about 1 wt % to about 20 wt %, about 5 wt % to about 20 wt %, about 10 wt % to about 20 wt %, about 15 wt % to about 20 wt %, about 0.5 wt % to about 15 wt %, about 1 wt % to about 15 wt %, about 5 wt % to about 15 wt %, about 10 wt % to about 15 wt %, about 0.5 wt % to about 10 wt %, about 1 wt % to about 10 wt %, about 5 wt % to about 10 wt %, about 0.5 wt % to about 5 wt %, or about 1 wt % to about 5 wt % of digestive enzymes.

[0353] Compositions comprising the disclosed SCP product can find application in various industries such as food, pharmaceutical, nutraceutical, cosmetic, agriculture, consumer goods, construction etc. The compositions can be used as food agents for human or animal consumption, cosmetic agents, pharmaceutical agents, nutritional agents, fertilizer and other agricultural agents, industrial agents, or any combination thereof. Illustrative applications include animal feed, food and beverages, infant formula, toddler formula, special dietary needs formula, reduced allergenicity formulas, skin-care and hair-care compositions, fertilizers, etc.

[0354] In some aspects, the SCP products as described herein are utilized in the production of a vegetarian or vegan food product. In certain embodiments, the SCP products are utilized in the production of an organic food product and/or pesticide-free and/or herbicide-free and/or fungicide-free and/or antibiotic-free food product. The SCP products may be utilized in a probiotic food product or in a prebiotic food product. In some aspects the SCP product may not include animal protein or fats.

[0355] In some embodiments, the SCP product can be incorporated into food products including, but not limited to, dairy products, dairy replacement products, meat products (including livestock, game, poultry, fish, or seafood products), meat replacement and/or imitation meat products (including imitation livestock, game, poultry, fish, or seafood products), bakery products, confections, health and protein bars, protein powders, sports and/or energy drinks, and/or protein shakes and/or smoothies. The type of food and beverage is not particularly limited, and can include, for example, noodles, instant noodles, soups, instant soups, pasta, microwave foods, canned foods, freeze-dried foods, soft drinks, fruit juice drinks, vegetable drinks, infant formula, toddler formula, non-dairy milk, coffee drinks, tea drinks, nutritional beverages, powdered beverages, protein powders, nutritional supplements, concentrated beverages, alcoholic beverages, breads, cake mixes, rice cakes, flour products, chewing gum, gummies, chocolate, caramel, cookies, snacks, chips, pretzels, crackers, biscuits, cakes, pies, confectionery, sauces, processed seasonings, flavor seasonings, cooking mixes, curries, stews, sauces, dressings, oils and fats, butter, margarine, mayonnaise and other condiments, milk drinks, yogurt, lactic acid bacteria drinks, ice creams, cream processed fish products, processed livestock products, agricultural canned products, jams and marmalades, pickles, cereals, nutritional foods, vegan or vegetarian meat substitutes, and the like. In certain embodiments, protein products are textured for incorporation into meat products and/or imitation meat products.

[0356] In some aspects, the SCP product has a high ratio of digestive enzymes. In certain embodiments, the SCP product may have an amino acid content is substantially similar, very close, or identical to that recommended by the United Nations Food and Agriculture Organization as “ideal.” In certain embodiments, food products made using the SCP products of the present disclosure represent healthy and/or low-calorie foods. The SCP product may be formed into fibers and/or thermally extruded and/or coagulated into a gel. Gel coagulation occurs at pH falling in a range of about 3 to about 6 upon heating. In some aspects, one or more properties of the SCP product makes it well suited for incorporation into food products, including but not limited to dairy products, dairy replacement products, meat products, meat replacement and/or imitation meat products, bakery products, confections, health and protein bars, protein powders, sports and/or energy drinks, and/or protein shakes and/or smoothies. The SCP product may be used as a meat extender, for example, as a meat extender in food products. In some aspects, water absorption and/or fat binding properties of the SCP product aids in reducing shrinkage (fat and water loss) on cooking and/or enhances the moisture and texture of the cooked patty or other meat or food item.

[0357] The SCP product may impart improved nutrition, water absorption, fat binding properties, texture, and/or eating qualities to a food product, such as a cereal based product. The SCP product may be used to fortify or is otherwise incorporated into a cereal based product. The cereal based product may be a breakfast cereal, cookie, cake, pie, brownie, muffin, or bread. In some aspects, the protein product may be used as a replacement for milk proteins (e.g. sodium caseinate) and/or as a vitamin and/or mineral supplement in milk or dairy products. The protein SCP ingredient may be used in one or more of non-fat dried milk, powdered milk, or dairy type drinks, such as, but not limited to, instant breakfast mixes, or imitation dairy type drinks including but not limited to soy milk, rice milk, and almond milk. The SCP product ingredient may be used in nutritionally fortified (e.g., protein, vitamin, and/or mineral fortified) candies, deserts, or treats.

[0358] The SCP product may be processed to produce a food product or ingredient thereof, in a process that includes heating the protein product, optionally in combination with other ingredients, optionally under shearing agitation, followed by extrusion to produce a product of desired texture (e.g., chewy, crunchy, crispy, resists dispersion in water, etc.). The SCP product can be processed to produce a food product or ingredient thereof, in a process that includes combining the SCP product with one or more additional protein sources (including, but not limited to, pea, rice, glutinous rice, wheat, gluten, soy, hemp, canola, insects, algae, and/or buckwheat).

[0359] In some aspects, free amino acids are included, either as part of the SCP product or supplemental to the SCP product, to impart a desired flavor. In one non-limiting embodiment, glutamic acid is included, thereby imparting an umami flavor to the food product.

[0360] In some aspects, for example, in a meat substitute or artificial meat product, a hydrogel, lipogel, and/or emulsion can be combined the SCP product, for example, as an agent release system (e.g., for release of a coloring agent, a flavor agent, a fatty acid, a leavening agent, a gelling agent (e.g., bicarbonate (e.g., potassium bicarbonate), calcium hydroxide, and/or alginate (e.g., sodium or potassium alginate)), wherein the agent(s) may be released during cooking of the food product to simulate animal meat).

[0361] In some aspects, a food product comprising the SCP produce may also include one or more plant protein source such as, but not limited to, pea, rice, glutinous rice, wheat, gluten, soy, hemp, canola, insects, algae, and/or buckwheat, in combination with a protein product produced by microorganisms as described herein (e.g., one or more of single cell protein, cell lysate, protein concentrate, protein isolate, protein extract, protein hydrolysate, free amino acids, peptides, oligopeptides, or combinations thereof), wherein the protein product imparts a flavor to the food composition, such as, for example, a meat-like flavor (including a livestock, game, poultry, or seafood meat-like flavor).

[0362] In some aspects, a food product, for example, a meat substitute or artificial meat product, includes a heme compound, such as a heme-containing polypeptide. In one embodiment, the food product includes heme (e.g., heme-containing polypeptide) from the microorganism from which the protein product is derived.

[0363] A meat substitute or artificial or imitation meat product (e.g., a livestock (e.g., beef, pork), game, poultry, fish, or seafood analogue product) may include a protein product produced by microorganisms as described herein (e.g., one or more of single cell protein, cell lysate, protein concentrate, protein isolate, protein extract, protein hydrolysate, free amino acids, peptides, oligopeptides, or combinations thereof). In some embodiments, the meat analogue product is a vegan product that does not contain any ingredients from animal sources. In some embodiments, an enhanced meat product which contains animal protein (e.g., a beef, poultry, pork, fish, seafood, or egg product) and comprises a protein product ingredient produced by microorganisms as described herein (e.g., one or more of single cell protein, cell lysate, protein concentrate, protein isolate, protein extract, protein hydrolysate, free amino acids, peptides, oligopeptides, or combinations thereof)), is provided. For example, the protein product may be included as an extender in an enhanced meat product or in a meat analogue product, e.g., the SCP product replaces any of at least about 10%, at least about 20%, at least about 30%, at least about 40%, at least about 50%, at least about 60%, or at least about 70% of the meat ingredient or an artificial or imitation meat ingredient (for example, a plant-based artificial or imitation meat analogue ingredient) to produce the enhanced meat product or meat analogue/imitation meat product, respectively.

[0364] In some aspects, the protein product is used as an aquaculture feed or in an aquaculture feed formulation. In some embodiments, the protein-rich biomass is used as a high-protein substitute for fishmeal used in aquaculture and/or other animal feed products. The animal feed may include up to 20% (w/w) or up to 10% (w/w) SCP product, wherein the SCP product comprises engineered C. necator cells described herein.

[0365] Protein and/or biomass produced according to the present disclosure may be converted to animal feed using methods and processes well known in the art and science of chemistry, chemical engineering, and food science. The feed produced through the disclosure may be used to grow organisms including but not limited to one or more of the following: other microorganisms, yeast, fungi, zooplankton, shellfish (e.g., shrimp, prawns, crabs, scallops, clams, mussels, etc.) or other invertebrates, fish, birds, and mammals. In certain non-limiting embodiments, the fish include but are not limited to one or more of: tilapia, tuna, salmon, cod, cobia, and haddock. The birds may include, but are not limited, to chickens, pheasants, or turkeys. The mammals may include but are not limited to one or more of: rodents, rabbits, goats, sheep, pigs, cows, horses, deer, dogs, cats, buffalo, llamas, alpacas, non-human primates, and aquatic mammals (e.g., dolphins, whales, manatees, etc.). The feed may be used to grow live-feed that in turn sustain finfish larvae through the first weeks of life. The feed produced may be used to grow zooplankton organisms including but not limited to one or more of the following: rotifers [Phylum Rotifera]; order Cladoceran (e.g., Daphnia sp., Moina sp.); sub-class Copepoda (e.g., Cyclops); Brine shrimp (Anemia sp.).

[0366] In some embodiments, the animal feed comprises up to 1% (w/w), up to 5% (w/w), up to 10% (w/w), up to 15% (w/w), up to 20% (w/w), up to 25% (w/w), up to 30% (w/w), up to 35% (w/w), up to 40% (w/w), up to 45% (w/w), up to 50% (w/w), up to 55% (w/w), up to 60% (w/w), up to 65% (w/w), up to 70% (w/w), up to 75% (w/w) or more of one or more of the disclosed SCP products. In some embodiments, the animal feed comprises at least 1% (w/w), at least 5% (w/w), at least 10% (w/w), at least 15% (w/w), at least 20% (w/w), at least 25% (w/w), at least 30% (w/w), at least 35% (w/w), at least 40% (w/w), at least 45% (w/w), at least 50% (w/w), at least 55% (w/w), at least 60% (w/w), at least 65% (w/w), at least 70% (w/w), at least 75% (w/w) or more of one or more of the disclosed SCP products. In some embodiments, the animal feed comprises about 1% (w/w), about 5% (w/w), about 10% (w/w), about 15% (w/w), about 20% (w/w), about 25% (w/w), about 30% (w/w), about 35% (w/w), about 40% (w/w), about 45% (w/w), about 50% (w/w), about 55% (w/w), about 60% (w/w), about 65% (w/w), about 70% (w/w), about 75% (w/w) or more of one or more of the disclosed SCP products.

[0367] The microbial cells of the present disclosure may be boiled prior to feeding to another organism (e.g., human or animal). The cells may sonicated, or otherwise lysed or ruptured prior to feeding to another organism (e.g., human or animal).

[0368] In some embodiments, the fertilizer comprises up to 1% (w/w), up to 5% (w/w), up to 10% (w/w), up to 15% (w/w), up to 20% (w/w), up to 25% (w/w), up to 30% (w/w), up to 35% (w/w), up to 40% (w/w), up to 45% (w/w), up to 50% (w/w), up to 55% (w/w), up to 60% (w/w), up to 65% (w/w), up to 70% (w/w), up to 75% (w/w) or more of one or more of the disclosed SCP products. In some embodiments, the fertilizer comprises at least 1% (w/w), at least 5% (w/w), at least 10% (w/w), at least 15% (w/w), at least 20% (w/w), at least 25% (w/w), at least 30% (w/w), at least 35% (w/w), at least 40% (w/w), at least 45% (w/w), at least 50% (w/w), at least 55% (w/w), at least 60% (w/w), at least 65% (w/w), at least 70% (w/w), at least 75% (w/w) or more of one or more of the disclosed SCP products. In some embodiments, the fertilizer comprises about 1% (w/w), about 5% (w/w), about 10% (w/w), about 15% (w/w), about 20% (w/w), about 25% (w/w), about 30% (w/w), about 35% (w/w), about 40% (w/w), about 45% (w/w), about 50% (w/w), about 55% (w/w), about 60% (w/w), about 65% (w/w), about 70% (w/w), about 75% (w/w) or more of one or more of the disclosed SCP products.

[0369] Starting with wet or dry microbial biomass produced as described herein, in certain embodiments, protein may be concentrated using a process comprising one or more of the following steps: liquid-solid extraction, removal and recovery of a solvent from the liquid extract, removal and recovery of a solvent from the solid (e.g., the protein concentrate), and drying and grinding of the solid (e.g., the protein concentrate).

[0370] A solid-liquid extraction may be performed batchwise or continuously. The solid-liquid extraction may be performed using one or more of: horizontal belt extractors; basket extractors; stationary extractors; and/or rotary cell extractors.

[0371] A non-polar solvent may be utilized in a solvent extraction step. A non-polar solvent may be utilized in combination with an alcohol solvent. A non-polar solvent may be utilized in combination with an aqueous alcohol solution. A non-polar solvent can be utilized to extract neutral lipids from an extract produced using alcohol and/or an aqueous alcohol solution. The non-polar solvent may be utilized that has a boiling point range (i.e., distillation range) of 65° C. to 70° C. A non-polar solvent may be utilized that consists primarily of six-carbon alkanes. In certain aspects, hexane is utilized as a non-polar solvent. The hexane utilized as a non-polar solvent may comply with the strict quality specifications required for the extraction of edible oils from soybean and other plant-based sources, including but not limited to: boiling (distillation) range, maximum non-volatile residue, flash point, maximum sulfur, maximum cyclic hydrocarbons, color and specific gravity. In certain aspects, “supercritical extraction” using liquid carbon dioxide under high pressure is utilized for solvent extraction.

[0372] The cell mass, i.e., microbial biomass produced as described herein may be kept in liquid suspension when subjected to solvent extraction or if dried, may be fed as a loose power with open, porous structure into a solvent extraction process. The rate of extraction can be increased by applying one or more of agitation and/or increasing the temperature. Higher temperature can result in higher solubility of the extractable material (e.g., lipid), and/or higher diffusion coefficients.

[0373] Water-free (absolute) low aliphatic alcohols, such as ethanol or isopropanol, are suitable solvents for lipids at high temperature, but the solubility of oils in these solvents decreases drastically as the temperature is lowered. In certain embodiments, lipid extraction takes place at high temperature one or more alcohol, including but not limited to ethanol, isopropanol, and/or methanol. In certain such embodiments, the lipid extract is cooled, and lipid saturation occurs. In certain such embodiments, the excess lipid separates as a distinct phase, which can be recovered by a solid-liquid separation process, such as, but not limited to, centrifugation. In certain such embodiments, the solvent, i.e., alcohol(s), is reheated and sent back for solvent extraction.

[0374] When a concentration gradient is used to transfer the extractable substance out of a solid, keeping the gradient high can facilitate the extraction process. In certain embodiments, the principle of counter-current multistage extraction is utilized to exploit this effect. In certain embodiments, the solvent extraction process is divided into a number of contact stages. In certain embodiments, each stage comprises the mixing of solid, e.g., microbial biomass and/or protein concentrate, and the solvent phases, and the separation of the two streams after extraction is achieved. In certain embodiments, in going from one stage to the next, the solids, e.g., microbial biomass and/or protein concentrate, and the solvent flow in opposite directions. Thus, microbial biomass and/or protein concentrate with the lowest extractable content (e.g., lipids) are contacted with the leanest solvent, resulting in higher extractable yield (e.g., lipid yield) and high driving force throughout the extractor.

[0375] The cell culture may be harvested in a logarithmic phase and/or in an arithmetic phase and/or in a stationary phase. Extraction can be performed using batch, semi-continuous and/or continuous solvent extractors.

[0376] In batch processes, a certain quantity of microbial biomass and/or biological material is contacted with a certain volume of fresh solvent. In certain embodiments, the extract is drained off, distilled and the solvent is recirculated through the extractor until the residual extractable content (e.g., lipid content) in the batch of microbial biomass and/or biological material is reduced to a targeted level.

[0377] A semi-continuous solvent extraction system may utilize that consists of several batch extractors connected in series. In certain such embodiments, the solvent and/or extract flows from one extractor to the next one in the series. In certain non-limiting embodiments, a French Stationary Basket Extractor is utilized.

[0378] A continuous solvent extraction process may be utilized in which microbial biomass and/or biological material and/or protein concentrate and solvent are fed continuously into an extractor.

[0379] A protein product (e.g., one or more of single cell protein, cell lysate, protein concentrate, protein isolate, protein extract, protein hydrolysate, free amino acids, peptides, oligopeptides, or combinations thereof), is derived from and/or includes biomass and/or protein isolate, protein extract, protein hydrolysate, free amino acids, peptides, and/or oligopeptides derived from one or more engineered C. necator strains described herein and may be produced by any method described herein. The disclosed protein products provide the additional benefit of including desirable digestive enzymes, which means the products can be prepared without separate or additional fortification with digestive enzymes.

### VIII. Examples of Embodiments

[0380] The following non-limiting list of embodiments provides examples of particular implementations of the present disclosure. Those skilled in the art will understand that additional and alternative embodiments may also be disclosed here.
[0381] Embodiment 1. A strain of Cupriavidus necator, comprising a transgene encoding a heterologous digestive enzyme selected from a protease, a carbohydrase, a lipase, and a phytase.
[0382] Embodiment 2. The strain of C. necator of embodiment 1, wherein the digestive enzyme is a protease.
[0383] Embodiment 3. The strain of C. necator of embodiment 1, wherein the digestive enzyme is a carbohydrase.
[0384] Embodiment 4. The strain of C. necator of embodiment 1, wherein the digestive enzyme is a lipase.
[0385] Embodiment 5. The strain of C. necator of embodiment 1, wherein the digestive enzyme is a phytase.
[0386] Embodiment 6. The strain of C. necator of any one of embodiments 1-5, further comprising a second transgene encoding a second heterologous digestive enzyme selected from a protease, a carbohydrase, a lipase, and a phytase.
[0387] Embodiment 7. The strain of C. necator of embodiment 6, further comprising a third transgene encoding a third heterologous digestive enzyme selected from a protease, a carbohydrase, a lipase, and a phytase.
[0388] Embodiment 8. A strain of C. necator that expresses a one or more heterologous digestive enzymes selected from a protease, a carbohydrase, a lipase, a phytase, and any combination thereof.
[0389] Embodiment 9. The strain of C. necator of embodiment 8, wherein the strain of C. necator expresses at least two heterologous digestive enzymes selected from a protease, a carbohydrase, a lipase, and a phytase.
[0390] Embodiment 10. The strain of C. necator of embodiment 8, wherein the strain of C. necator expresses at least three heterologous digestive enzymes selected from a protease, a carbohydrase, a lipase, and a phytase.
[0391] Embodiment 11. The strain of C. necator of any one of embodiments 1-10, wherein the protease is a savinase or a keratinase.
[0392] Embodiment 12. The strain of C. necator of any one of embodiments 1-11, wherein the carbohydrase is a cellulase, a β-glucanase, a xylanase, an amylase, or a galactosidase.
[0393] Embodiment 13. The strain of C. necator of any one of embodiments 1-12, wherein the heterologous digestive enzyme is from a bacteria, a fungi, a cyanobacteria, or a eukaryote.
[0394] Embodiment 14. The strain of C. necator of embodiment 13, wherein the bacteria is a Bacillus species (sp).
[0395] Embodiment 15. The strain of C. necator of embodiment 14, wherein the Bacillus sp. is selected from Bacillus subtilis, Bacillus licheniformis, Bacillus amyloliquefaciens, and Bacillus lentus.
[0396] Embodiment 16. The strain of C. necator of embodiment 13, wherein the eukaryote is a yeast.
[0397] Embodiment 17. The strain of C. necator of any one of embodiments 1-16, wherein the transgene(s) is/are codon optimized for expression in Cupriavidus necator.
[0398] Embodiment 18. The strain of C. necator of any one of embodiments 1-17, wherein the strain of C. necator is modified, optionally by adaptive laboratory evolution or genetic modification.
[0399] Embodiment 19. The strain of C. necator of any one of embodiments 1-18, wherein the strain of C. necator grows autotrophically at up to 40° C.
[0400] Embodiment 20. The strain of C. necator of embodiments 18 or 19, wherein the strain of C. necator has a H₂:CO₂ uptake ratio that is lower than the H₂:CO₂ uptake ratio of a wild type or naturally occurring strain of C. necator cultured under corresponding temperatures and conditions.
[0401] Embodiment 21. The strain of C. necator of embodiment 20, wherein the strain of C. necator comprises a full or partial deletion of a gene or locus encoding a membrane-bound hydrogenase.
[0402] Embodiment 22. The strain of C. necator of embodiment 21, wherein the membrane-bound hydrogenase is hoxKGXZ.
[0403] Embodiment 23. The strain of C. necator of any one of embodiments 1-22, wherein the strain of C. necator produces about 40%, about 50%, about 60%, about 70%, about 80%, about 90%, or about 95% by weight of protein.
[0404] Embodiment 24. The strain of C. necator of any one of embodiments 1-23, wherein the strain of C. necator is deposited at DSM34774.
[0405] Embodiment 25. A method of preparing a single-cell protein product, comprising: (a) culturing the strain of C. necator of any one of embodiments 1-24, thereby creating biomass comprising protein and a digestive enzymes, (b) isolating the C. necator or the biomass, and (c) preparing a single-cell protein product from the C. necator or the biomass.
[0406] Embodiment 26. A method of producing a digestive enzyme, comprising culturing the strain of C. necator of any one of embodiments 1-24 such that the digestive enzyme is produced.
[0407] Embodiment 27. The method of embodiments 25 or 26, wherein culturing comprising growing the strain of C. necator in a fermentation tank.
[0408] Embodiment 28. The method of embodiment 27, wherein the fermentation tank is a gas fermentation tank.
[0409] Embodiment 29. The method of any one of embodiment 25-28, wherein culturing comprising growing the strain of C. necator in autotrophic conditions.
[0410] Embodiment 30. The method of embodiment 29, wherein the autotrophic conditions comprise providing carbon monoxide (CO) or carbon dioxide (CO₂) as a carbon source.
[0411] Embodiment 31. The method of any one of embodiments 25-30, wherein culturing comprising growing the strain of C. necator at a temperature above 30° C. and up to 40° C.
[0412] Embodiment 32. The method of any one of embodiments 26-31 further comprising isolating the digestive enzyme.
[0413] Embodiment 33. The method of any one of embodiments 26-31 further comprising isolating the strain of C. necator.
[0414] Embodiment 34. A single-cell protein (SCP) composition, comprising the strain of C. necator of any one of embodiments 1-24 or biomass created therefrom.
[0415] Embodiment 35. The SCP composition of embodiment 34, wherein the composition comprises at least about 40%, about 50%, about 60%, about 70%, about 80%, about 90%, or about 95% by weight of protein.
[0416] Embodiment 36. The SCP composition of embodiments 34 or 35, wherein the composition comprises at least about 40%, about 50%, about 60%, about 70%, about 80%, about 90%, or about 95% by weight of a digestive enzyme component.
[0417] Embodiment 37. The SCP composition of embodiment 36, wherein the digestive enzyme component comprises a protease, a carbohydrase, a lipase, a phytase, and any combination thereof.
[0418] Embodiment 38. The SCP composition of any one of embodiments 34-37, wherein the composition is produced by culturing the strain of C. necator of any one of embodiments 1-24, thereby creating biomass comprising protein and digestive enzyme, and isolating the C. necator or the biomass.
[0419] Embodiment 39. An edible product, comprising (a) the strain of C. necator of any one of embodiments 1-24 or biomass created therefrom, or (b) the SCP composition of any one of embodiments 34-38.
[0420] Embodiment 40. The edible product of embodiment 39, wherein the edible product is an animal feed.
[0421] Embodiment 41. The edible product of embodiment 40, wherein the animal feed is selected from a fish feed, a livestock or ruminant feed, a swine feed, goat feed, llama feed, turkey feed, a poultry feed, a rodent feed, a dog feed, and a cat feed.
[0422] Embodiment 42. The edible product of embodiment 39, wherein the edible product is a human food.
[0423] Embodiment 43. The edible product of embodiment 42, wherein the human food is selected from a yogurt, a smoothie, a bread product, a pasta product, a nutritional bar, a chip or cracker, a plant-based meat substitute, a cheese, a plant-based cheese, a powdered nutritional supplement, a dairy product, a dairy replacement product, a meat product, a bakery product, a confection, a protein bar, a protein powder, a sport and/or energy drink, a protein shake and/or smoothie, noodles, instant noodles, a soup, an instant soup, a microwaveable food, a canned food, a freeze-dried food, a soft drink, a fruit juice drink, a vegetable drink, an infant formula, a toddler formula, a non-dairy milk, a coffee drink, a tea drink, a nutritional beverage, a powdered beverage, a nutritional supplement, a concentrated beverage, an alcoholic beverage, a cake mix, a rice cake, a flour product, chewing gum, gummies, chocolate, caramel, a cookie, chips, pretzels, crackers, biscuits, cakes, pies, a sauce, a processed seasoning, a flavor seasoning, a cooking mix, a curry, a stew, a dressing, an oils/fat, a butter, a margarine, a mayonnaise and other condiments, a lactic acid bacteria drink, an ice cream, a cream processed fish product, a processed livestock product, an agricultural canned product, a jam or marmalade, a pickled product, and a cereal or cereal product.
[0424] Embodiment 44. A method of preparing an edible product, comprising mixing (a) the strain of C. necator of any one of embodiments 1-24 or biomass created therefrom, or (b) the SCP composition of any one of embodiments 34-38 with one or more edible ingredients.
[0425] Embodiment 45. A nutritive or consumable composition comprising a strain of C. necator described herein.
[0426] Embodiment 46. The composition according to embodiment 45, wherein the composition is or comprises a yogurt, a smoothie, a bread product, a pasta product, a nutritional bar, a chip or cracker, a plant-based meat substitute, a cheese, a plant-based cheese, a powdered nutritional supplement, a dairy product, a dairy replacement product, a meat product, a bakery product, a confection, a protein bar, a protein powder, a sport and/or energy drink, a protein shake and/or smoothie, noodles, instant noodles, a soup, an instant soup, a microwaveable food, a canned food, a freeze-dried food, a soft drink, a fruit juice drink, a vegetable drink, an infant formula, a toddler formula, a non-dairy milk, a coffee drink, a tea drink, a nutritional beverage, a powdered beverage, a nutritional supplement, a concentrated beverage, an alcoholic beverage, a cake mix, a rice cake, a flour product, chewing gum, gummies, chocolate, caramel, a cookie, chips, pretzels, crackers, biscuits, cakes, pies, a sauce, a processed seasoning, a flavor seasoning, a cooking mix, a curry, a stew, a dressing, an oils/fat, a butter, a margarine, a mayonnaise and other condiments, a lactic acid bacteria drink, an ice cream, a cream processed fish product, a processed livestock product, an agricultural canned product, a jam or marmalade, a pickled product, or a cereal or cereal product.
[0427] Embodiment 47. The composition according to any of embodiments 45 to 46, wherein the composition is incorporated into one or more articles, converted into one or more second products, end-user products, consumer products, or any combination thereof.
[0428] Embodiment 48. The composition according to any of embodiments 45 to 47, wherein the composition is incorporated into pet food or animal feed.
[0429] Embodiment 49: A recombinant C1-fixing microorganism comprising a transgene encoding a heterologous digestive enzyme selected from a protease, a carbohydrase, a lipase, and a phytase.
[0430] Embodiment 50: A recombinant C1-fixing microorganism that expresses a one of more heterologous digestive enzymes selected from a protease, a carbohydrase, a lipase, a phytase, and any combination thereof.
[0431] Embodiment 51: The recombinant C1-fixing microorganism of embodiments 49 or 50, wherein the microorganism is selected from the group consisting of Cupriavidus necator and Ralstonia eutropha.
[0432] Embodiment 52: The recombinant C1-fixing microorganism of any one of embodiments 48-51, wherein the microorganism does not natively produce polyhydroxyalkanoates (PHAs).
[0433] Embodiment 53: The microorganism of any one of embodiments 49-52, wherein the microorganism expresses at least two heterologous digestive enzymes selected from a protease, a carbohydrase, a lipase, and a phytase.
[0434] Embodiment 54: The strain of C. necator of embodiment 538, wherein the microorganism expresses at least three heterologous digestive enzymes selected from a protease, a carbohydrase, a lipase, and a phytase.
[0435] Embodiment 55: The microorganism of any one of embodiments 49-54, wherein the protease is a savinase or a keratinase.
[0436] Embodiment 56: The microorganism of any one of embodiments 49-55, wherein the carbohydrase is a cellulase, a β-glucanase, a xylanase, an amylase, or a galactosidase.
[0437] Embodiment 57: The microorganism of any one of embodiments 49-56, wherein the heterologous digestive enzyme is from a bacteria, a fungi, a cyanobacteria, or a eukaryote.
[0438] Embodiment 58: The microorganism of embodiment 57, wherein the bacteria is a Bacillus species (sp).
[0439] Embodiment 59: The microorganism of embodiment 58, wherein the Bacillus sp. is selected from Bacillus subtilis, Bacillus licheniformis, Bacillus amyloliquefaciens, and Bacillus lentus.
[0440] Embodiment 60: The microorganism of embodiment 57, wherein the eukaryote is a yeast.
[0441] Embodiment 61: The microorganism of any one of embodiments 49-60, wherein the transgene is codon optimized for the microorganism.
[0442] Embodiment 62: The microorganism of any one of embodiments 49-61, wherein the microorganism is modified, optionally by adaptive laboratory evolution or genetic modification.
[0443] Embodiment 63: The microorganism of any one of embodiments 49-62, wherein the microorganism grows autotrophically at up to 40° C.
[0444] Embodiment 64: The microorganism of embodiment 62 or 63, wherein the microorganism has a H₂:CO₂ uptake ratio that is lower than the H₂:CO₂ uptake ratio of a wild type or naturally occurring strain of C. necator cultured under corresponding temperatures and conditions.
[0445] Embodiment 65: The microorganism of embodiment 64, wherein the microorganism comprises a full or partial deletion of a gene or locus encoding a membrane-bound hydrogenase.
[0446] Embodiment 66: The microorganism of embodiment 65, wherein the membrane-bound hydrogenase is hoxKGXZ.
[0447] Embodiment 67: The microorganism of any one of embodiments 49-66, wherein the microorganism produces about 40%, about 50%, about 60%, about 70%, about 80%, about 90%, or about 95% by weight of protein.
[0448] Embodiment 68: A method of culturing the microorganism according to any one of embodiments 49-66.
[0449] Embodiment 69: A product comprising the microorganism according to any one of embodiments 49-66 or a biological component (e.g., protein, etc.) derived from the microorganism.

### IX. EXAMPLES

[0450] The following examples are given to illustrate the present disclosure. It should be understood, however, that the disclosure is not to be limited to the specific conditions or details described in these examples.

### Example 1—ALE Strain of Heat Resistant C. necator Bacteria

[0451] A continuous-flow stirred tank reactor (CSTR) was inoculated using a base strain of C. necator (H16 PHB-4) and grown continuously on minimal media and H₂/O₂/CO₂ inputs. The base strain, DSM 541, is a naturally occurring C. necator mutant that is unable to produce or express polyhydroxybutyrate (PHB). Once the culture was established and growing at steady-state, the reactor temperature was increased step-wise and held to allow the organism to adapt. These step changes were continued over ˜100 days and brought the reactor temperature from 30 to 39° C. (FIG. 1). Glycerol stocks were created and Whole Genome Sequencing conducted at various temperatures along the way to preserve progress and determine what beneficial mutations arose. Later, a separate CSTR was inoculated at 37° C. from the glycerol stock harvested at 37° C. during the evolution. This adapted strain started successfully, whereas other CSTRs using the base strain would only start at 30 and not 37° C., thus confirming the creation of a distinct phenotype.

[0452] As demonstrated in Table 1, the base strain was capable of growth on rich media during plate and inoculum growth at 30 to 37° C., but fails to grow autotrophically (minimal media, H₂/O₂/CO₂ feed) at 37° C. and above. However, the temperature evolved strain DSM 34774 surprisingly demonstrated growth under autotrophic conditions at 37° C. (Table 1, FIG. 2). Further, DSM 34774 was capable of growth on CO₂/H₂/O₂ gas mixtures at elevated temperatures of up to 39° C.

| Run # | 1 | 2 | 3 | 4 | 5 |
|---|---|---|---|---|---|
| Strain | DSM 541 | DSM 541 | DSM 541 | DSM 541 | DSM 34774 |
| Plate growth [° C.] | 30 | 30 | 37 | 37 | 37 |
| Inoculum growth [° C.] | 30 | 30 | 37 | 37 | 37 |
| Reactor startup [° C.] | 30 | 37 | 37 | 30 | 37 |
| Successful startup? | Yes | No | No | Yes | Yes |

[0453] The evolved strain DSM 34744 was equally capable of sufficient culture and growth at lower temperatures ranging from 30-37° C.

### Example 2—Expression of Protease Enzymes in Cupriavidus necator

[0454] Heat adapted strains of C. necator were transformed to express a savinase derived from Bacillus amyloliquefaciens or a savinase derived from Bacillus lentus. Genes encoding these proteases and linked HiBiT tags were expressed via rhamnose inducible promoter.

[0455] Protease expression in total cell lysate of synthetic constructs with HiBiT tags detected using was analyzed via a HiBiT Lytic Detection System. As demonstrated in FIG. 3, protease expression resulted in significant expression detection upon addition of 0.1 mM rhamnose indicating significant protease enzyme overexpression in heat adapted strains of C. necator.

### Example 3—Expression and Activity of Phytase Enzymes in Cupriavidus necator

[0456] As demonstrated in FIG. 5, heat adapted strains of C. necator were transformed to express a phytase derived from Escherichia coli (EcAppA) or a phytase derived from Citrobacter braakii (CbraPhy). The phytase amino acid sequence was either modified or unmodified with the periplasmic targeting sequence CaaSP. Genes were codon optimized for C. necator and expressed via a rhamnose inducible promoter. Phytase expression was evaluated with a SDS-PAGE gel comparing samples before induction and 2 days after the addition of 0.1 mM rhamnose. Bands were observed for phytases with the CaaSP sequence. Phytase activity was evaluated in clarified lysate by measuring the release of phosphate from 5 mM phytic acid over 2 hr incubation at 50° C. Phytase activity was normalized to total protein. Phosphate was measured via malachite green assay kit (Sigma-Aldrich, MAK307). Total protein was measured via bicinchoninic acid assay. Activity above a negative control strain was observed for phytases CbrBraPhy, EcAppA, and CaaSP-CbraPhy. As depicted in FIG. 6, expression of phytase enzymes in Cupravidus necator. Overproduction of two phytases, CaaSP-CbraPhy and CaaSP-EcAppA, in C. necator was observed in an SDS-PAGE gel stained with Coomassie. An extra protein band was observed at the correct sizes (48.8 kDa and 47.4 kDa, respectively) in the induced lane relative to the uninduced lane.

[0457] It should be appreciated that all combinations of the disclosed concepts are provided as being part of the inventive subject matter disclosed herein and may be employed in any combination to achieve the benefits described herein.

[0458] The present technology is not to be limited in terms of the particular implementations described in this application, which are intended as single illustrations of individual aspects of the present technology. Many modifications and variations of this present technology can be made without departing from its spirit and scope, as will be apparent to those skilled in the art. Functionally equivalent methods and apparatuses within the scope of the present technology, in addition to those enumerated herein, will be apparent to those skilled in the art from the foregoing descriptions. Such modifications and variations are intended to fall within the scope of the present technology. It is to be understood that this present technology is not limited to particular methods, reagents, compounds compositions or biological systems, which can, of course, vary. It is also to be understood that the terminology used herein is for the purpose of describing particular implementations only, and is not intended to be limiting.

1. A strain of Cupriavidus necator, comprising a transgene encoding a heterologous digestive enzyme selected from a protease, a carbohydrase, a lipase, and a phytase.

2. The strain of C. necator of claim 1, wherein the digestive enzyme is a protease.

3. The strain of C. necator of claim 1, wherein the digestive enzyme is a carbohydrase.

4. The strain of C. necator of claim 1, wherein the digestive enzyme is a lipase.

5. The strain of C. necator of claim 1, wherein the digestive enzyme is a phytase.

6. The strain of C. necator of claim 1, further comprising a second transgene encoding a second heterologous digestive enzyme selected from a protease, a carbohydrase, a lipase, and a phytase.

7. The strain of C. necator of claim 6, further comprising a third transgene encoding a third heterologous digestive enzyme selected from a protease, a carbohydrase, a lipase, and a phytase.

8. A strain of C. necator that expresses a one or more heterologous digestive enzymes selected from a protease, a carbohydrase, a lipase, a phytase, and any combination thereof.

9. The strain of C. necator of claim 8, wherein the strain of C. necator expresses at least two heterologous digestive enzymes selected from a protease, a carbohydrase, a lipase, and a phytase.

10. The strain of C. necator of claim 8, wherein the strain of C. necator expresses at least three heterologous digestive enzymes selected from a protease, a carbohydrase, a lipase, and a phytase.

11. The strain of C. necator of claim 1, wherein the protease is a savinase or a keratinase.

12. The strain of C. necator of claim 1, wherein the carbohydrase is a cellulase, a β-glucanase, a xylanase, an amylase, or a galactosidase.

13. The strain of C. necator of claim 1, wherein the heterologous digestive enzyme is from a bacteria, a fungi, a cyanobacteria, or a eukaryote.

14. The strain of C. necator of claim 13, wherein the bacteria is a Bacillus species (sp).

15. The strain of C. necator of claim 14, wherein the Bacillus sp. is selected from Bacillus subtilis, Bacillus licheniformis, Bacillus amyloliquefaciens, and Bacillus lentus.

16. The strain of C. necator of claim 13, wherein the eukaryote is a yeast.

17. The strain of C. necator of claim 1, wherein the transgene(s) is/are codon optimized for expression in Cupriavidus necator.

18. The strain of C. necator of claim 1, wherein the strain of C. necator is modified, optionally by adaptive laboratory evolution or genetic modification.

19. The strain of C. necator of claim 1, wherein the strain of C. necator grows autotrophically at up to 40° C.

20. The strain of C. necator of claim 18, wherein the strain of C. necator has a H₂:CO₂ uptake ratio that is lower than the H₂:CO₂ uptake ratio of a wild type or naturally occurring strain of C. necator cultured under corresponding temperatures and conditions.

The application's sequence listing, which the Patent Office published only in electronic form, follows.

SEQUENCE LISTING (3 sequences)

SEQ ID NO: 1 - DNA, 4049986 bp, Cupriavidus necator (residues 1-2,024,993 of 4,049,986)
  source 1..4049986: mol_type = genomic DNA
gccgtacatcgcgcccaggctcatggccgccggcgtcgccgccggcacgcgcacggtgttggccgggagcgtggcttcgagcacggccggcagcaccacgctgccctgcccttgcgtgacccgcaccggatcgccggactggatgccaaggctggcgaacaggtcggccggcagcgcgatctgcatggcgcggcgcgcggcagcgctcagctgcagcgactcggcgcggcgcacgatcggatcggcgtggtagatcggcacatcggcaatgcgttcgatgccgttggcggcagcggcggccacgcggatcggcgcgtcggtggcgttgtccagctgcgcgtcgaccggggccgacagcacttcggcacgcaccgattcggcggtttcgtagtcgaagccggccacgtccagcaggttgcccagcacgcgcagcaccttccagcccggacgcgattcgcccagcgcgcgcaccacgccgttgaagctctgcggcttgccttcgcagttgacgaaggtgccggcggtttccgtgaacggcgtcaccggcaggatcacgtcggcgtactgcatggccgcttccgaacggaacggcgacagcaccaccaccgtgccggcctgggccagcgcggccagcgccttgcgcgggtcggcggcgtcgaactcgggttcggtgttcagcaggatgtaggccttgcgcggcgtgtccagcatcgcctgcgcattggcgccgccctgcctgggcagcgcgccggcgacatagccgccgacggtattggcggcttcggtcaggaagcccagcgtcgcaccggtttcggtggcgatccactgtgccagcgcgtgcagcgccgagaactgcggatggcgcacggcctcgttgccgaggaacaccgcacggcgctcgcccgacagcagcgcttcggccgtcttggcggcaacatcgccaccgtcgaaaccttcggtgccggccggggcagccacgcccttggcggcggccacggcacgggccacgcctgcgagggccgcggtccagcccgacggcgccacgtcgatgcgggcggccaagggcatcagcaggtcttcaccgccggcacccagcaccgccacgcgggcacccttcttggtagcctggcgcaggcgcgaggccagcagcggatgatccttgcgcagcgacgagccgaccaccagcacgcgttgcagggtggtcacgtcggccaccggcatgcccagccacggcgcgcccttcagtgccgccgagaagtcggtctggcgcaggcggaagtcgacattgtcgctgcccaggccgcgcatcagcttgcccagcaggaacagctcttccagcgtgctgtgcgggctggccagcgcggcgatctggtcggcgccatgatcgcgcttgatgctggtgaggccgttggccacatattcgagcgcggtctgccagtcggtttccatccattcgccgccctgcttcagcagcgggcgggtcaggcggtcggcgctgttcaggccttcatacgagaagcggtccttgtcggagatccagcactcgttgatgtcttcgttttccagcggcagcacgcgcatcacgcgctggttcttggtctgcaccaccaggttagcgcccaggccgtcgtgcggcgacaccgacttgcggcgtgccagttcccaggtgcgggccgagtagcggaacggcttgctggtcagcgcgccgaccgggcacaggtcgatcatgttgcccgacagttccgagtcgacggtcttgccgacgaaggtggtgatttccgaatgctcgccgcggcccagcatgcccagctccatcacgccggccacttcctggccgaagcgcacgcagcgggtgcagtggatgcagcgggtcatctcctccatggagatcagcgggcccacgttcttgtggaacaccacgcgcttctcttccttgtagcgcgactccgaggcaccgtagcccacggccaggtcctgcagctggcattcgccgccctgatcgcagatcgggcagtcgagcgggtggttgatcagcaggaattccatcacggacttctgcgccttgaccgccttctccgaattggtgaagaccttcatgccgggggtcaccggcgtggcgcaggcaggcagcgccttcggggccttttcgacctcgaccaggcacatgcggcagttggccgcgatggacagtttgcggtggtagcagaagtgcgggatgtaggtgcccagcttgcgggctgcttccatcaccaggctgccttcagcaacctcaaccttcttgccgtcgatctctagttcaaccatgttctgccacgcttagatgtaggccggaaccatgcactgcttgtgttcgacgtgatattcgaactctttccagtagtgcttgagcatgccgcggaccggcatcgccgcggcatcgccgagcgcgcagatggtgcggcccatgatgttttccgcgacgttgttgagcaggtccaggtcttcctggcgcccctctccgtgttcgatgcgattgaccatgcggtagagccagccggtgccttcacggcacggcgtgcactggccgcacgattcctcaaaatagaagtacgacaggcgcagcagcgagcggaccatgcagcgcgtctcgtccatcacgatcacagcgcccgagcccagcatcgagccggccttggcgatcgagtcgtagtccatgtcggacgccatcatcaggtcgcccggcactaccggcgcggacgaaccgcccgggatcaccgccttgatgcgcttgccgccgcgcatgccgccggcgagctccagcagcttggcgaacggcgttcccagcgggatctcgtaattgccgggacgttcgacgtcacccgagatcgagaagatcttggtgccgccgttgttcggcttgcccagcttcaggtagttctcggggccgacggccagcaggaacggcaccgcggcaaacgtttccgtgttgttgatggtggtcggcttgccgtacaggccaaagctggccgggaaaggcggcttgaaacgcggctggcccttcttgccttccagcgattcgagcagcgcggtttcctcgccgcagatataggcgccgtagccgtggtgcgcgtgcagctggaaatcgaagcccgaacccaggatgttgtcgcccaggaagccggcagcgcgcgcctcttcgagcgcttcctcgaagatcttgtactcgttccagatctcgccgtggatgtagttgtagcccacggtgatgcccatcgcatacgcgccgatggccatgccttcgatcagcgagtgcgggttgtagcggatgatgtcgcggtccttgaacgtgccgggctcgccttcatcggtgttgcagaccaggtatttctgccccgggaacgtgcgcggcatgaagctccacttcaggccggtcgggaagcccgcaccgccgcggccccgcaggcccgaggccttgacgtcggcgatcacctgctcgggcgggatcttctcggtcagaatgcgcttcagttgctggtagccgccacgcttgacgtagtcttccaggtgccaattcttgccgtccaggccggccaggatcagcggctggatatggcggtcgtgcagactggtcatgttacttgccccctttggcagcttcggctttcagctcgtcgacgagcgcgtcgagcttgtcgtcgctcatgaagctgcacatgcgggtgttgttgacgatcatcaccggcgcgtcgccgcaagcgcccatgcactcgccctctttcagggtgaagcagccgtcagcggtggtctcgttgtaatcgatcccgagcttgcgcttcaggtactcgccggcccgctcgccgcccgacagggcgcacggcaggttggtgcagacggcgagcttgaatttgcccaccggcttggtgtcatacatgttgtagaaggtcgccacctcttccacccacacgggcggcatctcgagatagctggcgacgaactgcatgacttcgggggaaacccagcccacctcgccctgcgccacggcaagcgccgccatcacggccgactgcttctggtcggccggatacttcgcgatcgcgcgatcgatttccttgagagcttctgctgatagcatggtcattgcagtaaaacggcgtcaggcagcgccaccgggcgttcccttccgcaggtttgcagccgtcgctgcccgttccgccggcaggcctgaggccgtaccggtccgccgcgggtcttccgcccgctccccctggggagcgccgcggaaagcgcccggatcgtcgtccgggccggcggtccgtgattagcggtcgatctcgccgaagacgatgtcttgcgtgccgatgatcgttaccgcgtcagcaatcatgtgtcccttggccatttcgtcgagcgcggccaggtgagggaaaccaggtgcacggatcttcaggcggtacggcttgttggccccgtccgagatcgcgtagatgccaaattcgcccttcggatgctccaccgctgcatacgcttcgccttccggcacgtgcatgccttcggtgaacagcttgaagtggtggatcagttcttccatgttggacttcatgtccacgcgcgagggcggcgccaccttgtggttgtcggtgatcaccgggcccgggttgcggcgcagccattccacgcactgcctgatgatgcggttggactggcgcatctcttccacgcgcaccaggtagcgcgcgtagcagtcgccgcccacgcccaccggcacgtcgaagtccagcttgtcgtacacctcgtacggctgcttcttgcgcaggtcccactcgatgccggagccacgcagcatcgggccggtaaagcccatctgcagcgcacgttccgggctgaccacgccgatatccaccaggcgctgcttccagatccggttgtcggtcagcagcgtctcgtattcgtcgacgtacttcgggaaccggttggtgaagtcctcgatgaagtccagcagcgaacccgaacgcgcctcgttcatggccttgatggcgcgctcgttgtgtaccttggaggcacgatattgcggcatcgtgtcaggcaggtcgcggtagacgccgcccggacggtaataggccgcgtgcatgcgcgcgcccgacaccgcctcgtacatgtcgaacatgtcctcgcgctcgcggaaggcgtacaggaacaccgccatcgcgcccacgtccagcgcgtgcgagccaatccacatcaggtggttcagcaggcgggtgatctcgtcgaacatcacgcggatgtactgcgcgcgcaccggcacttccaggcccagcaggcgctcgatcgccatcacgtaggcgtgctcgttgaccatcatcgacacatagtcgagtcggtccatgtatggcacgctctggatccaggtcttctgctcggccagcttctcggtggcacggtgcagcaggccgatatgggggtcggcgcgctggatgacttcgccgtccagctccagcaccaggcgcagcacgccgtgcgcagccgggtgttgcgggccgaagttcagggtgtagttcttgatgtctgccatggcgcgttatcagtgcaagccgccgtagttgtcctcgcggatcacgcgcggggtgatttcgcgcggctcgatcgtgaccggctggtagatgacccgcttctgctccgggtcgtagcgcatctcgacgaagcccgagaccgggaaatccttgcggaacggatggccgacgaaaccgtagtcggtcaggatgcggcgcaggtccggatggccgtcgaacacgatgccgtagaaatcgaaggcttcacgctcgaaccagttgacgccgttccacacgtcgatcagcgacggcagcaccgggaaatcatcgtccggggcgaacacgcgcacgcgcaggcgccagttgtgggtgatcgacagcagctgcgaaaccgcggcaaagcgcaggccgtcccaggcaccgtcgccgtactcggaatagtccacgccgcacaggtcgatcagctgctcgaagcgcagcgacgggtcgtcgcgcaggatgcgggcaacttcgaggtagtcgtcggccttgacgatcagcgtcagttcgccggtcgcctcgatcaggttctgcacgcgcttgccgagagctttctcgagcgcggccttcaggatgtcaagcttcgccatttcagcccttgcgcgcgatggtgttggtgcgcttgatcttgttctgcagctggatcacgccgtagatcagcgcctcggccgtcggcgggcagcccggcacgtagatatccaccggcacgatgcggtcgcagccacgcaccaccgagtacgagtagtggtagtaaccgccgccattggcgcacgagcccatcgagatcacccagcgcggttctgccatctggtcgtagaccttgcgcagcgcgggggccatcttgttgcacagcgtgccggccacgatcatcacgtccgactggcgcggcgacgggcggaaaatcacgccgaagcggtccatgtcgtagcgcgcggcgccggcatgcatcatttccacggcacagcaggccaggccgaaagtcatcggccacagcgacccggtgcgggtccagttgatcagcttgtcagcggtagtcgtgacaaagccttcgttgagaacgccttcgattgccatttcacatcactcccaatcgagcgcgccctttttccagatgtagacgaagcccacgatgaattccagcagaaacacgcccatggcgatgaaacccggccagccgatatccctcagggcgacaccccacggaaacaggaaggcggtttcgaggtcgaacaggataaacaggatggcgatgaggtagtagcgcacatcgaacttcatgcgcgcgtcctcgaacgcttcgaagccgcactcgtacggcgacagcttcgcgggatcgggcttgttcggaccgaggatccgaccgatcgacatcagcgccacgccaagcacgacaccgaagatgatgaagatgagaacggggaagtaggcttcgagattcaaggtacggccagccttatctggaatgttgtcaacagcaccagctgaagcggcgtcctgttgcccaccccaggcgctaagccatgagcctcatggcgcgccgccttgcggactgccggagccccacgctcgggtgcattgcccggccagggactccgatcaagttgtttggtgccgacggcgagactcgaactcgcacagctttcgccactaccccctcaagatagcgtgtctaccaatttcaccacgtcggctgggggagaaacaatattgcctggcgccgggttttcaggcccttcaggtccgttgcagaggctttcgtctttgctcggaacccatcgctggggaatcgtttcaagccttgcattctaacccagatttcttgctttgttcaacgcacaactgcaaaaaaactcaggaatccgccgcaaggcttacggattatttcggtacagcgggagctgccggcgccgatgcatcagcggccgctgccggggctgcagcgggagccgaagcacctgccactgcgggcgccgaagccggcgccgcgcccatcacgcccagcgatgcagccggcttgtagttgcccagcagcgtcagcgccagcgtgcagacgaagaacagcgtggccagcacggcggtggtgcgcgacaggaagtttgccgagccggtggcaccgaacaggctgcccgaggcacccgaaccgaatgccgcgccgacatcggcgcccttgccatgctggatcagcaccaggccaatcacgcccagcgccgacaacacctgcagcaccaccaacaaagtcttgaagattgccatttgatttagataagccttactggctggttacttgcctgatcggtcgatcggaacggccggcattcaggcgttgccgatcgcgagaaaatctgccgacttcagcgaggcgccgccaatcaggcccccgtcgatatcggtcatggaaaacagttcggccgcattgtccggcttgacgctgccgccgtacaggatggccatacgctcggccacgcccgcgtcgcgcgcggcaacctggccgcgcaagaacgcgtgcaccgcctgcgcctgctcgctggtggcggtcttgccggtgccgatcgcccagaccggctcataggccaacaccacgcggctcagctgctccaccgtcagcgcgtccagcacggcctgcagctgcctgccgaccaccgcttcggtttcgcccgcctcgcgctgggccagtgtttcacccacgcagactaccgggacgatgccgaattccagcgcgcgcagcgccttggccgcgacggtctggtcggtttcgccatgataggtgcggcgctccgagtggccgaccagcacataagtgcagccaaactcacccaccatcgatgccgagacttcaccggtgaaggcgccgcgcgcctctgccgacacatcttgtgcgccccaggccacttgcgagccattcagcaacgcctggcattgtgcaagataggggaacggcgcgcagaccgccagcgtcgccttggccgcgccagccttgatgccctccagcagcgccgcgtttgcagccaggctgccatgcatcttccaattgccgatgacgagcttttgtctcacgaagtgcccctcccaaatcaaacccgctattgtagcttgtggcgggggcacggcgctaccgccgcccgatggcggcgggcggcagcattggccacatgcaacgctcgatgtgccttaccaggtcagcacgatcttgccgatatgctcgctcgactccatcaggcgatgcgcatcggccgcctgcgcggccgggaacacctcgtggatcaccggcttgatcctgccggcggccagcagcggccacacctgctcgtgcagtgccgcggcgatcttgcccttgaacgatgccgggcgcggacgcagcgtggagccggtcacggtgatgcgccggcgcaggatatcgcccagcgggatctcggccttggcgccacccagcagcgcaatgatgacgatgcggccatcgtcggcgatgcacttcagctcgcgcgccaggtacgggccggcaaccatgtcgaggatcacatcgacaccgttgccgccggtcagcgccgacacctcggcgacgaagtcctgcgtcttgtagttgatcgcgcgatcggcgcccaggtcttcgcaggccttgcatttctcatcggtgccggcggtgacaaacaccttgtagcccagcgccttggcgatctggatcgcggtcgtgccgatgccgctggagccgccctggatcagcagggtctcatccttgccgcgcgggccctggcccaggcagccgcggtcgaacacattgctccagacggtgaagaaggtctcgggcagcgccgcggcctcgatatcgctcaggccttgcggcgcgggcaggacctgtgccagcggcgccgtgcacagctgtgcgtagccgccgccctgcaccagcgcgcagacgcggtcgcccaccttcaggccgaagcggttgtcggcatgcgacaggtcgccgcccaccaccacgcccgccacttccaggccgggcaggtccgaagcgcccggcggcacggggtagttgccggtgcgctggaatacgtccggacggttgacgccggcggcagccacgcggatcaggacctcgcccgcccccgcaaccgggtcgggacgctcggtcagctggaggacttcgggggcaccgtattcgcggatctcgatggcttgcatgctgctctgctccttgtacttgtcttggcgcgggtcgacgatgcgtcgcaccagggtcggtgtgagccttggctcgatagggttgccggcagtgtaaacaaaaaaacggctggacatcgtccagccgtttttttggcggcaccaccttgcggcggcacctgcgggcaatcctgccccgctggctttactgctgttccgagccttcggccggagccgccggcgcggcggcttcgccggcgttgatcgggctgatgctgccgccctcttcggtcagcgcggccttcagcgacaggcgcaggcggcccttctcgtcagcctggatcagcttgacacggacctgctggccttccttcagccagtccttgatgtccttgacacgctcgttgacgatttccgagatgtgcagcaggccatccttgcccggcaggatgttgacgatggcgccgaagtccagcagcttcagcacggtaccggcgtaaatcttgcccacttcggcttccgcggtgatgccctcgatgcggcgcttggcttcggccatgccgtcggtcgaggtcgacgcgatcgtgatcgtgccgtcttcctggatgtcgatggtggtaccggtttccttggtcagcgcctggatggtcgagccgcccttgccgatcacttcgcggatcttgtccggatggatcttcatggtgatcatgcgcggagcgtgcgccgacagttcggtgcgggcgtggcccatcgcttcctgcatcttgtgcaggatgtgcaggcggccttcacgggcctgcgccagcgcgacctgcatgatctccttggtgatgccctggaccttgatgtccatctgcagcgcggtgatgccgttgtcggtacccgccaccttgaagtccatgtcgcccaggtgatcttcatcgcccaggatgtcggtcagcacggcaaacttgttgccttccaggatcaggcccatggccacgccggccacgtgtgccttgaccggaacgccggcgtccatcagcgccaggcagccgccgcagaccgaagccatcgacgacgagccgttggattcggtgatttccgaaaccaggcggatggtgtaggcgaattcatcgtccttcggcagcaccgggatcagtgcgcgcttggccaggcggccgtggccgatttcacggcgcttcgggctgcccacgcggccggtttcaccggtggcgaacgggggcatgttgtagtggagcatgaagcggtcgcggtattcgccggccagtgcgtcgatgatctgctcgtcgctcttggtgccgagcgtggccaccaccagcgcctgcgtttcaccacgggtgaacagcgccgagccgtgcgcgcgcggcagcaccgacgagcggatctcgatcgggcgcaccgtgcgggtgtcgcggccgtcgatacgcggctcgccggccagcacctggccgcgcacgatcttggcttcgaggtcgaacatgatgttgccgacttccaccttgtcggcttccacgccggcggctgccagcgcggccgccacgttggcgtttacttccttcagcttctggctgcgggccgacttctggcgcagctggtaggcttcctgcagcagcggcagcgcaacttcggtgaccttggcgatcagcggctcgttcttggcggccggggcccagtcccactcgggcttgccgccttcgcgcaccagctcatggatggcgttgatcgcgatctgcatttgctcatggccatagaccacggcgcccagcatgacgtcttccgacagctggttggcttccgattccaccatcagcacggcgcgctcggtaccggcgaccaccaggtccaggtccgaggtggcgagctgcgagcgggtcgggttgagcaggtactggccatccttgtagcccacgcgcgcggcgccaaccgggccgttgaacgggatgcccgacacggccagcgcggccgacgcgccgatcagcgcgggaatgtcagcgggcacttccgggttcagcgacaccacgtggatcaccacctggacgtcgttgtagaagccttccgggaacagcgggcgcagcggacggtcgatcaggcgcgaggtcagggtctcgttttccgacggacggccttcacgcttgaagaagccgccggggatcttgccggccgcgtaggtcttctcgatgtagtcgacggtcagcgggaagaagtcctggcccggcttcgggttcttggcggcgaccacggtcgccagcaccacggtgtcttccacatcgaccagcacggcaccgccggcctggcgggcgatttcgccggtttccatgcggaccgtgtgctggccccactggaattccttgacgatcttgttgaacatggacatgtgcattccttggcttgcgtgcaggccgcgcaatcacgcaataacacgcgcacggcctgcgacgcctgcgttctcagccgcaggcaaactgccgggtcgccggtcgcagtcgcagggaagtgctatgccattccagcacggcaccggcgttgccgatgccgtgctggaatgacacaaagccctgtttccttggccggtccggggtattgaaaacaaaaaaagaacaacttactccgttgcgcagcttgctgcaacgggcgcccggtgaatcagaatgtccgccgggcggcgtgaagcgaaaatcactccatcaactgcccgcatctctgggcaaggccgattcaccccgccagaaatgcaaaatgcctgccccagcattgctgaagcaggcatcgaggcctcacgcgaaaccgtgcaaaccctggaatcgcgctgccatcgggcgcaaccttacttgcgcaggcccagcttttcgatcagggcgcggtaacggtcggcgtcgttggacttgaggtagtccagcaggcggcgacggcggctcaccatgcgcagcagaccgcggcggctgtggtgatccttcatgttggccttgaagtgcggggtcagttcgttgatgcgggtggtcagcagggccacttgcacttcggggctgccagtgtcgttggcgccacgtgcgaactgcttgatgacttcggacttgttgatatcggcaactgccatgatgatttcctttcacttgcgaacgctacagcgcgggatgcgccgcatgcgtcgtgccatgtcttgactggctaccgccgccaccgggccaacggccaggcaacgacagccgcggattatagccgaaaagctacggcaggaataccgggcggcccgtgcgggcgcgctggcgctcaggggcgctccatccggcacgtggtgggcagcgtggtctgcgcggccttgagcttgcgcacggtacggaagccataacccgagccctcattgtcgaagcgcactgccccgccctggcgctccatcaccgacacgtacagcggctgcagcacctggtggtcgtcggcgcgcacggtggcctcgtggaactggttgacgtagcgcatgttctcgagcgcgcccgccaccttgaccgcatcggtggaaccggcctgctcgatcgcgcgcgccagcatttccaccatcatctgcatgcgcaggtgcacgtagtcgtccttcggctccggatagcgcgcgcggaactgctggtagaacgcgtccgacgccgccccgcccacattcgggtgccactcggccaccgccagcacgcggcccacgccggcatcgcccatcgccgcgggcgcgcccaggccattgccatagaaggtgtagaacttggcctgcagtccgccttcgcgtgcggccttgaccatcagcgtcaggtcgttgccccagttgccggtgatgactgcgtccgccccgctcgccttgatcttggcgatatagggcgcaaagtccttgatcttgccgatcgggtggaactcgtcgcccacgatctggatatccggccggcgcgccgccagcatctcgcgagccgagcgcgacacctggtggccgaagctgtagtcctgatcgatcaggtacaccttgcgcaccgactggtcctggcggatcacctcggtcagcgcctgcatgcgcatgtcggcactggcgtcaaagcggaaatgccagaagctgcagttctcgttggtcaggctgggatcgaccgccgagtagttcaggaacagcacgcgcgcgtcgggctggcgcgcattgtggcggttgatggccgacaccagcgcgccggccacggccgagctgttgccctgcaggacaaagggaatgcgcttgtcggtcagggcccgcaactggatcaggctctcgtcgacattgcccttgctgtcaaaggtgaccagctccatgggccgcgcaccctcggcggtcttcacgccgccgcgcgcattgatgcgctcgattgccaggcgcaggttgcgcgtcacggcttcgcccgcgttggcaaacgggccggacaacccgtcgatcatgcccagccggatcggctcttgagccgacgcgcccgccgctgccgccagcaacaacccgcccagccatccacgccaccgtgccgcaaccttcatgttctctcccggaaagcgcaggatagtaaggcagcgaccggttgcgggcaaatgccaccgggcccgatcattgactgccgtttccgcgaggaaagcgccaggttgcgggaagatccactgaaaagcagcgcccggcgcacacaagcgcggaggccgcactacacttgcggtattcaccatccacgcatcgaccgaggttcgccatgaattctgtcatcgccaacggcgcgcgccggctcatgctggcgctgggcgccgccatgctgtctgcctgcaccacgctgatgccggtaccggaaggcaccaggctggtgggccagccgcaggccgcagtacaggctgcgttcgggccgcccaccgatgtgttccagctgcgcgacggtacctcgcgctggatctacaccaagcagccgctgggccagtacgcctatggtgccgacttcgaccgcaacggcaacctgacccgcttcagcaatgtgctgtccacgctggaactgtacaaggcgcaggtcggcacctggaccaagcaggatgtggccgagcatttcggcatgacgcgcctgccggtcgagtactacccgctgatgcggcgcgaggtctggtcctaccgcttccgccatgaagacgtgtggccgtcgctgtaccacttctatttcgacgacgccggcatcctgcgccagacccagatcacgcccgacccgatgtacgaccccgacgagcgccgccgctgagccatgaaaaaagcccgccatccccgggtcgggaatggcgggcctggtccggacgctcaggccgggtaagccttccgccgtctacgcaggggcctgggtcagatctgcggattgatcttttgcacagccttgtcgtgcagcttgttcagcgcggccaggtaggccttggccgaggcggcgacgatatccgggtcggtgcccacgccgttgacgatgcggccggccttggacaggcgcacggtgacttcgccctgggcctcggtgccgccggtgatggcattcaccgaatagagcaccatctctgcgccgctggacacgcgtgattcaatcgcatgcagggtggcgtcgaccggaccgttgccctcgccctcgccgctctgctcctggccgtccatgctgaacaccacgcgcgcatgcgggcgctcaccggtctcggagcgctgcgacagcgagataaagcggaagtgctcgttggcatcgtgctgggcctcattcgagacgatggcgacgatgtcctcgtcgaagatctcggccttctggtcggccaattccttgaagcgggtgaaggcggcgttgacttcggtttcgctttcaagctcgatgccaagctcctgcaggcgctgcttgaaggcattgcggcccgacagcttgcccagcacgatcttgttggcgctccagcccacatcctccgcacgcatgatctcgtaggtgtcgcgcgccttgagcacgccatcctggtggatgcccgaggcatgcgcgaaggcattggcacccacgacggccttgttcggctgcaccacgaaaccggtgatctgcgacaccagcttcgaggccggcacgatctgcgtggtatccacgccgatatcgaggtcgaaatagtcgcggcgggtcttcaccgccatcaccacttcttccaggctggtgttgccggcgcgctcgcccaggccgttgatggtgcattcgatctggcgcgcgcccgccatcttgacggcggccagcgagttggccacggccatgcccaggtcgttatggcagtgcaccgaccagatcgccttgtccgagttgggaatgcgctcgcgcaccgagcggatcagctcggcgtagccttccggcacggcatagcccacggtatccggcaggttgatggtggtcgcaccctcggcgatcacgccttccagcacgcggcacaggaagtccatgtccgagcggctgccgtcttccggcgagaactcgatatcgtcggtgaactggcgcgcaaagcgcaccgccaggcgggcctgctggtacacctcgtccggcgtcatgcgcagcttcttctccatgtgcagcgcggaggtggcgatgaaggtgtggatgcggaacgagttggccggcttgagcgcctcggcggcgcgggcaatgtccttgtcgttggcacgggccagcgagcagatggtcgagtccttgaccacctgcgcgatcgagcggatggcctcgaagtcgccgttggagctcgccgcgaaaccggcctcgatcacatcgaccttcaggcgttccagctggcgtgcgatgcggatcttttcctcgcgggtcatcgaggcgccgggcgactgctcgccgtcacgcaaggtggtgtcgaaaatgatgagtttgtcagacattttgtggagctcctgattgcttgtcgtgtgctgtccccggcatgctgcgtccggggcctaccgcctgttccgcgctccacggctgtggaatgcaaaacgccccggcgtgcatggagcaggccggggcgttggaaaaattccttgcggatttcgcgctaaggggtaagtccgtccttagcgcgcgcgcgtcccgacctgatggcctagtaggccacctagggtggtgcgggcgattagaacttggcgcgaaatcatgccagcgactatagccgagttggcgcgcccatgcaatacagggtttagcccatattgcccggacccgccagcggcacggatcagcccttgggcggaatgcgcagcttctggcccgggtagatcttgtccgggtggctcagcatcggcttgttggcctcgaagatcttgttgtactcggcaccgttgccgtaagcagcctgggagatcgcccacagcgtgtcgcccttgaccacggtatgccagctcgattccgcggattcgacgttgacggacatcttgtcctcgaccttgtccacgccctcgacattgccggcgcacaggatgatcttctcgcgcgtggcctggtccggtgccacgccgaacacggtgaccagcccctgcgagccgtccacctgcaccatcagcccggtggcatccaggcccatcttcctgatgtagccctcgatcgcatcgcccgcggcgcgattggcggcatcgaccttctccgccgacgcatccgccgcggcggcctcttgcgcggccttggcctcgcccgtgccgaacagcttttctcccgcttccttgatgaagtcgaacatgcccatgacatcctcctgacggtgagtggaaaacactgcagagtgccacgccttgatggccgcggcatgaaaacaattgtgaatccggaaatgcatgaagggcgcctgagcgcccttctgcctgaaacgtctaagaagccttgccgccgttctcgcgctgcttcttctcgatggccggcttgccgtgcatcgcccgccaggcccatagcacatagcccgagatcgcataggccacgaacaggccgaacagcgccaccggcggatcggtggacaccaccacgaacagcaccaggaccagcaccatcatgccgaacggcacgcggtagcgaacgtcaagcgccttgccgctgtagaacggcgcgttggacaccatcgacaggccggcgtacagcgtgatgccgaacgccacccacggcatccacagctccttgaccggcagcttgttgtcgatcaccagccagacgaagcccgcgaccagcgcggcggcggccgggctgggcaggccctggaagaagcgcttgtctaccacgccgatgttggcgttgaagcgcgccaggcgcagcgcagcgcaggtgcagtagacaaaggctgcgatccacccccacttgcccaggtcatgcaggatccactcatacatcaccagcgccggcgcaaccccgaaagaggtcatgtccgacagcgagtcatactgctcgccaaacgcactctgcgtattggtgatgcgcgccacgcgcccgtccatgccgtccagcaccatcgccgcgaagatggcgatggccgccgcatcgaagcgcatgttcatggcctggacgatggcgaaaaaacccgcgaacagcgccgcagtggtgaacgcgttgggcagcaggtagatgccgcgccggcgcggacgctgatagacgatgtcgtggtcgtcggcggcttcgtcatcgaagttgtcgtcggcgccgcgcagctggttatggcggaacggccgcaggtgggtcacgttgccgctgctgctgcgcttgttacgtcgatggaaggcaaccatcacagtcctccggtcaggctgtctctcacttcacgtcgagttcggcgaggatggtcgacgaggccgataccttctcgccgatggtcacgcgcggacgcgcatcgagcggcaggtagacgtccacgcgcgagccgaagcggataaagccgtagcgctggccgcgcgagaggttgtcgcccaccttggtgtagcacaggatgcggcgagccaccaggccggccacctgcaccagcgtcaccagctggccgtccgcagcgcgccggatcagcacggcattgcgctcgttctcgaccgaggccttgtccatgtcggcgttgacgaacttgccggggaaatattcgaccttctcgaccgcgccatcgaccgagacccggttcgagtgcacgttgaagacgttcatgaagacgctgatcttcagcgcctcgcggccggcgtacgggtcctgggtcttttcgaccacgacgatgcggccgtccgcgggggccagcaccgcgttgggctgcgacgggatcgggcgcggcggatcgcggaagaactggagcacgaataccgtgatgatccacaacggcaacgcccaccagaagcccgcgctggcgtgcaccagcagcgagatgacaaaggcgccggccaggaacggccagccttcacgggcgatcagcggatgaggatagttcatgcagtacaggtgtcggtggatacaagaccatggcaaggcggcgcggcggcggcaatagccgccatcgggcggcgcccccgtggtcgcggagcaggataatgcacgccttgcccaaagtctgacaagcataacaaaaagccgttcaggtcccgcgactcccctctgataatagaagggcgtggcacggaacgctgaacggcttcggcccgccgccgtgcggcgcgggccatcagacagcgatgcagcttagttcttcgactggtcgaccatcttgttcttggcgatccacggcatcatcgcgcgcagcttggcacccacttcctcgatctggtgctcggccgtcaggcggcggcgcgagatcagcgtcggggcgccggccttgttctccagcaggaagctcttggcgtactcgccggtctggatgtcggtcaggcactgcttcatcgccttcttggtctcttcggtcaccacgcgcgggccggtgacgtactcaccatattccgcgttgttggagatcgaatagttcatgttggcgatgccgccttcgtagatcaggtcgacgatcagcttcagttcgtgcaggcactcgaagtaggccatttccggcgcgtagccggcttccaccagggtttcgaagccagccttgatcagctcgacggtaccgccgcacagcacggcctgctcgccgaacaggtcggtttcggtttcttcgcggaagttggtctcgatgatgccggcacggccgccgccgttggcggtggcgtacgacagcgcgatgtcacgggcggcgccggacttgttctggtgcacggcgatcaggtgcggcacgccgccaccttgcgtgtacgtggcgcgcacggtgtggcccggggccttcggcgcgatcatgatcacgtccaggtcggcgcgcgggatcacggcaccgtagtgcacgttgaagccgtgggcgaaggccagcgccgcgccttccttgatgttgtcgtgcacttcgttcttgtacacgtcggcgatctgctcgtccggcagcaggatcatgaccacgtcggcacccttgacggcctcggccacttccttcacttgcaggccggcgttggcagccttgttccacgacgcgccgctcttgcgcaggccgaccgtcacattgacgcccgaatccttcaggttcagcgcgtgggcatggccctgcgagccatagccgatgatggtgacgttcttgcccttgatcagggagaggtcggcgtccttgtcgtaaaacactttcatgatgattccttcaatctctgtcttttgtatgaggggggcggcatcctcggacgcatcgtgtgcgtccggatcgcgccgccccggggatgctgcgtgaagccgtatgggtgagccggggcccggtcagaccttcaggatgcgctcgccgcggccgatgcccgagccaccggtacggacggtctcgaggatggcggtgcggtcgatggcgtccaggaacgcatcgagcttgacgccgttgccggtcagctcgatggtgtaggtcttctcggtgacatcgatgatgcggccgcggaagatgtcggcggtgcgcttcatttcctcgcgctccttgcccaccgcgcgcaccttgacgagcatcagctcgcgttcgatgtgcgcgccttcggtcaggtcgaccaccttgaccacttccaccaggcggttcaggtgcttggtgatctgctcgatcacgtcatccgagccggaggtgacaatggtcatgcgcgacagcgaggcatcctcggtgggtgccacggtcagcgtctcgatgttatagccgcgggccgagaacaggcccaccacgcgcgacagcgcgcccggttcgttttccagcaggaccgaaatgatgtgacgcattacaggtcctccgcgccgagcagcatttcggaaatgcccttgcccgcctggaccatcggccagacgttttcggtgggatcggtctggaagtccaggaacacggtacggtccttcaggcggaacgcctcgcgcagcgccggctcgacgtccgacgtcttctcgacgcgcatgccgacgtgcccgtaggcctcggccagcttgacgaaatcgggcagcgcgtccatgtaggagtgcgagtaacggttgtcgtactcgatctcctgccactggcgcaccatgcccaggtagccattattgagcgagcagatcttcaccggggtgtcgtactgcaggcaggtcgacagttcctggatgcacatctggatcgagccttcaccggtgatggtgacgacttccttttccgggaatgccttcttgatgcccatcgcgtacggcaggcccacgcccatcgtgcccaggccgccggaattgatccagcggcgcggctcgtcgaacttgtagaactgcgcggcccacatctggtgctggccgacgtcggagcagataaaggcgtcgcccttggtcagttcccagatcttttccaccacgtactgcggcttgatgatctcggagctgcggtcgtacttcaggcagtccaccgaacgccattgctcgatctgctcccaccatttggcgagcgcttcgcgcttgggcttgatatcgctggccttgatctgggcgatcagttcctgcagcacgtccttgacgttgccgacgatggggatgtcgaccttgacgcgcttggagatcgacgacggatcgatgtcgatatggatgatcttgcgcgcctgcgaggtgaagtgcgccgggttgccgatcacgcggtcgtcgaagcgggcaccgatggcgatcagcacgtcgcagttctgcatggccatgttggcttcatacgtgccgtgcatgccgagcatgccgacgaactgcttgctggtgccggggaacgcgcccaggcccatcagcgtgttggtcaccgggtggccggtcagcgccgccagctggcgcagctcgtcgctggcattggccagcaccacgccgccgccggtgtagatatacggacgctcggcgccttgcagcagggccacggccttgcggatctggcccgagtggcccttgtttaccgggttgtacgagcgcatgtcgatcgacttggggtactcgtacttgcaggcattgcgcgagacatccttggggatgtccaccaccacggggcccggacggccggtcgcggcaatgaagaacgccttcttgatggtcgcggcgaggtcgcgcacgtccttcaccaggaagttgtgcttgacgatcgggcgggtaatgccgaccgtgtcgcactcctggaaggcgtcctggccaatggcgtgggtcggcacgttgccggtgatcaccaccatcgggatcgagtcgaggtacgcggtggcaataccggtgacggcattggtcacgccgggaccggaggtcaccagcgccacgcccaccttgccggttgcccgtgcatagccgtctgcggcatgaaccgcggcctgctcgtggcgcaccaggatgtgctcgaacttggtttgcttgtggagctcgtcgtagatatacagcactgcgccgccggggtagccccagacgtactcgacgccttcttcggcaagtgcgtgaacgagaatttccgccccgatcatttcgggtgcggcagatgaattgctgtctgcgtgggagaattccgcgctgggcatgttcatttcagtcctttgcaattttcggcaaaaaattgtttggatgctctctgccgggcttgtggctcgggttcaagcggtgcgcgtctgcatggaagaccgcctcataagcggccggatgagacaaccactgatgtcgtgtgaaccgatgatgatactgcaatgcaccagcgcggtctacggttgtttttgccctgcgcatgagggattttccggagttgcggcggattttttgcgcgccgcaatgtatttgcagcaatacaaagtggtacagggggtcgtttttttgctagcatcgcagcacctcgaatgtgccacgggccgtacgcagcacattcaccagaaccgggcatttgtcccgcagcaacgagccgcaaccgcccgaatggccaccgaccaggaactgtccgattttcttgccagcgtcgagcgccgcgccttcaagcaggccgtatttgcggtccgcgacgacgacgccgcgctggacattgtccaggacgccatgatcaagctggccgagaagtacggcgacaaaggcgccgccgagctggcgccgctgttccagcgcatcctgcagaacaccatccacgactggttccgccgccagaaggtgcgcaacacctgggtctcgctgttttccagcctgcgcgacgaccgcgacggcgacgacaatgacctgcttgagacgctggaggcacaggccggctccgaatcggccgaaagcagcgccgacaaggtcgagcgcgcccaggtcatgcacatcatcgagcaggaaatccagcgcctgccgacgcgtcaacgcgaggcattcctgatgcgttactgggaagatatggacgtcgccgaaaccgccgccgtaatggggtgctccgaaggcagcgtcaagacgcactgttcccgtgccacgcatacacttgcgcaggccctgcgcgcacggggggtccgactatgagcagaaacgaaaaagaaatccgcgaacgccggtttgcccaagagattcgggcggcactcgatgccggcaccgacgacctgccggccgacatcaccgaaaggctcgccgctgcgcgccggatggcggtcgcccgcaagaaggccgaggcgcccgtgctggtcccgcaactggccatgcccggcgcgcacgtcccgctgtttgatgaagacagctccccgctgtaccgcgccggcgcctggctgcgccgccttggcctgatctggacgctggtggcgctggccgccggcctgatcggcatctatcactggcaggagcagaagcgcatcgaggaactggccgatatcgacgccgccatgctgctcgacgacctgccgcccacggcctacgccgacgagggcttccacgtattcctgaagcgcgggcaatagcatggcgcgcgcaatattccaccccgacgccttgcgccgccggctggccgcgctgctggccggtgccggcgcagccgcctgctggggcctgctgccgcccgcggcgcatgcccagggggcttcggcggtgacagcgcctgcggccgcgcaggcaaccaatgcccggccggcctgggccgatctgagcccggtcaaccagcgcatcctggccccgctgcagccgctgtgggacagcctgccggaactgaaccgccacaagtggctgcgcatcgccgagcgctaccccaagttctccccggccgagcaggcccggctgcaggcgcgcatggcggaatgggtcaagatgaccccgcagcaacgtcggctggcgcgcgagaactaccagatcacccgctcgctgccggccgagaaaaaggccgaggcctgggacaagtaccagcagctgcctgaagagcagaaaaagaagctggccgccaccgaccacgtgccgcgccgccccggcgctgtcagcgcgctgcccagtggcaagcgcctgcccagcgaaaccagccgcgagttccaccgcgagccgaaatcggccagcgccgcagcgggtcgcagtggccacactgccggcaagcccgccagcgaagcccaggcgcaaccggcctccgcgcccgcggccgtgaccgccgcctcggcgccggccgcctcggcaccggcagcgctcgccgcaccggcatccgcagccgaggtcgccaccgaagcggccgcggcttccgacgccaccgtgcgccagtaatccccacgtcatttggcataatggctgtctcacgccggccagcgcagcaaggccggccccgactgacccgcgccggcaccgccatgcccccgtgcgccagcccagccttcttcgccttccatgcccgctgccaccctcgatcccaagcccgccgcagccgcccgccccgccgccccgcccttgcgccgacgcatcgcctgcatgctctatgagggcgtgctgctgttcggcgtgctgagcgcctcgaccgctgcctacctgctggtgcaaccgctgctgcagaagcttggtgtggacgggccgctcgtgatccaggtgtggagcttcctggtgatgggcctgtatttcacctggttctggcaacgcaacggccagaccctggccatgcagacctggcgcatgcgcgtcgagaacgccgccggcgtgccgccgcgctggccgcaggcggcgctgcgctacgtgctggcatggctgtggctgccgccatcggcggcagtcggccatatgctggggctggtcaaggggccgtttgtagcggtgctgtgcgccggcctgctggtctgggtcctgctggcgtggctggatccgcgccgccagttcctgcatgaccgcctggccggcacgcggctgaccgacctgcgcccgcccaagccatgagcctgtcggctgccggcatccgccgccttgcggtgaccttgcaggcagccgccgcgctgggcatcgccgccgggctggtgcaactggccggatggccatggcccggcgcggtcgccgccggtgtggcggccatcctcggcagcttcgccagcggcattgccttcgctttcgccctgagcgggcgcggcctgtgggtcgggcgcggcaatcacccgcccgcaccaccgcttgaactcgccgccacgcgccgtccgctgcgcctgcctgaggcgttgcgctgctttgcggccgagtgcgtggccgtgctgcgcatgttcgactggctgcagccattccgcgcgcacgcgccctttgccgcaccgctcgatgccctgcccggccgcgacgccccgccggtgctgctggtgcacggctacgcctgcgggcaggccatctggctcgacatgcagccggcactggccgccgctggctaccgctgcgaggggatcgagctcaagccggtgttcggcgacatcgacgactacgcgcgcacgctgctggccgccatgcggcgcatcacagccgaggccggacgcccgccgctgctggtctgccacagcatgggcgggctggccgcgcgcgccgcactgcagctggcgggcgacgaagacgtctgcgccggcgtggtgacgctgggcagcccccatcacggcagcgcgctggcgcgctttggcggcggccccaatgcgcgccagatgcgttgcggcagcccctggctgcgcgcgctcgccgccgcggaaaccccgcgccgccgtgcgcgcatgatctcgatcttcagctggcatgactcgatcgccgggccgccttgcaccggctggctcgacggcgccgggcatattgcgctggccggcatcggtcatgtcacgctgctgcgccatcccgccgcggtgcgtgcggtactcgacgccctcgcggagctgtccgcgcgcgggcactgacacctgcgccagccaggactgttccacttccgccacgattcatatgtcagtcatgtttccgtcacggcaccgtcatcgcgggctggctgaatgcagccatcgccgcaaccgggactgccatggtgcaagcaatccgatctgcccgcgggtatttgtcgaagaccgcgcaactgacgcaatggctgcgccgcagccctgacagcgacagcgccgcgccgctgaccgccttcatggcgccggccctggatgccgcgctggcaccccagcgcgaacagcagcagacctacccgcccgagccgcacccgatccagcgctaccgcgccatctggctgtcggacatccacctgggcacgcccggctgccaggccaactacctgctggacttcctcaagcacaacgaatccgaccagctctacctggtcggcgacatcatcgacggctggcagctgcgccgcggctggtactggccgcaaagccacaacgacgtggtgcagaagctgctgcgcaaggcgcgcaagggcactgaagtgatctacgttcccggcaaccacgacgaggccgcgcgccagttcgacggcatggccttcggcgacatcaccgtgcgcgaagaggcggtgcatgtcaccgcctccgggcgccggctgtgggtggtgcacggcgacctgttcgacggcgtggtgcagcacgcgcgctggctggcctacctcggcgattcgctgtacacggtgatcctggcgctgaaccgccacttcaaccggctgcgcgcgcgcctgggcttcccgtactggtcgctgtcgcagttcctcaagcaccaggtcaagaacgcggtcaactacatcggcgcgttcgagagcgcgatggtcgatgaagcgcgccgccgcggctgcgatggcgtggtctgcggccatatccacaaggccgagatccgcgaggtcaatggccagctctactgcaacgacggcgactgggtcgaaagcctgtcggcactggtcgagaccatggaaggcgagctgaagatcgtctactggaccacgctgctggacgcgccggccccggccacgcgccgccgtcgccgcgccgccgtggcgggctgatcccggcctgccaccgtttgccccaaccgcattgcccttccaccgcgcccgaggaggctgcatgaagatcctgatcgtcaccgatgcctgggaaccgcaggtcaacggcgtggtgcgcacgctcaagtccacgcgccgcgaactcgaggccatgggccacacggtcgacatgatcacgccgctggaattccgcaccgtgccgtgcccgacctaccccgagatccgcctgtcgctgttcccggcggcgcgcgtgcagcgccgcatcgaggccttcgctccggatgccttgcatatcgccaccgaagggccgctgggcctggccgcgcggcgccacgcgctccgccgccggctgcccttcaccaccgcctaccacacgcgctttccggaatacgtgcaggcgcgcttcggtatcccgctggcatggacgtaccgcttcctgcgctggttccacggccaggcccaggcggtgatggcgcccaccccggtggtgctggacgacctgcggcgcaatggcatcaccaacgccgtgctgtggacgcgcggcgtggacctggacgtgttcacgctgcagcgccccaacgtgctcaacaccgcccacccgatcttcctgtacgtgggccgcgtggcggtggaaaagaacgtcgaggccttcctggcgctggacctgcccggctccaagtgggtggtcggcgacggcccggcgctgccggcgctgcgcgcgcgctatccgggcgccaactacctgggcgtgctgagccagcccgagctggcccgggtgtatgcttcggctgatgtgttcgtgttcccgagccgtaccgacaccttcgggctggtgctgctggaagcgctggccagcgggctgcccgtggccgcctatccggtcaccggcccgatcgatgtgctgggcgacagccccgccggcgcgatgcacgaagacctgcgcgaagcctgcctggaagcgctgcgcatcgaccgcgccacggcacgtgcccacgccgagcggttctcgtggcgcgccgcctccgagcagttcctggcccatcttcggccgttcgctgccggcaagccaggccgcgacagcgcagcggcccaacccgccccgcaaaaccatgcccaaaccccatccggaactgccgtccgacccgcctctgcagaggccgccgcaggcagtccagagcgctgactattcgatcgagcagaacccccacaaggccaaccgcggcctgacgcgcgcctggcatgcggccatcaattcgctgtcggggctgcgctatgcggtgctcgaggaaagcgcgttccgccaggagctgacgctggtggcaatcctggcgccgtgggcattcctgctgccggtggacgtggtcgagcgcatcctgctgctgggcacgctgctggtggtgctgatcgtcgagttgctcaattccagcgtcgaggcggcaatcgaccgcatttcgctggagcggcacagcctgtccaagcgtgccaaggatttcggcagcgccgcggtaatgctggcgctggtgctgtgcggcggcacctgggtcgccatcgccgggccgcacgtggtgcgctgggtgcggacgctggcgggctgatccgtcactcgccggggatgccggatggggtggccgggccgattgcttataatcgctaccctgcccccgacttactgatcgcaccgatcgcccggacgcccatggaaccgaaaccgcaaaccggcccccgccgcaccagggaccgcatcctcgacgtctcgctgcgcctgttcaacgaagtcggcgaacccaacgtcaccaccacgacgattgcggaagccatggagatcagccccggcaatctctactaccacttccgcaacaaggacgacatcatcaactccatcttcgtgcgcttcgagcaggagatggagcggcgcctgaagatgccggacgaccacaaggccacgctggacgaaagctggggctacctgcagtacatgtccgagttcctgtggaactaccgcttcctgtaccgcgacatcaacgacctgctggcgcgcaaccggatgctggagaccaacttcaagcgcatcgtcgagcagaagaagcgctttgcgcacgagatctgccgccagttcatcgacgacggcgagatggaagccacgcccgagcaggtcgaggccatctgcaccaacatggtggtgatcgccacctactggctgtcgttccagttcgtgcagcatccgcgccagtacaacgaccccgagcagattcgcggctacctgcacggatcgagctaccacatcttctcgatcctggcgccctacctgcgcggccgggcccgggacgcattcgaccagctggcgcgcgactacgcggcagccaaggccgcagccgacgcggcaaaggaagcaaagtgaaatcggtctgcgtgtattgcggctccagccccggcaaccgtcccgaatacgccgaaggcgcgcgcctgctaggccgcacgctggccgaaagcggcctggcgctggtgtacggcggcggcaaggtgggcctgatgggcatcgtcgccgacgccgtgatggaacatggcggcagcgccatcggcatcatccccgacgcgctgatgcagaaggaagtgggccaccgcggcctgaccgagctgcacgtggtgcgcaacatgcacgagcgcaagcagatgatggcggaccgtgccgacgcctttatcgccatgccgggcggcgtgggcaccttcgaagagctgttcgagaccttcacctggctgcagctgggctaccacgacaagccggtgggcctgctgaatgtcaacgggttctacgacggcctgctgggtttccttgcgcacgcagtgcgggaaggcttcatgaagcaggtgcatgccgacctgctgcatgtggcagacacgcccgccggcctgctgggccagctgggccagctggcggccgctccgcgcgtgcgcgtcgacaagtggcaacaggcgcgcgacaagacctgagcgcgcccctgctgccggcccggttcagaacgacgagcccggctgccgcaggaacgccagttcctgctctgtgctctgcctgcccagcaccgcattgcggtgcgggaagcggccgaagcgcgcgatgatcgcgcggtgcttttcggcccactccaccacatccaccacgccgccgctggcctcgcgcagctgcgtcatcagacgcactgcctcgtcctggtcctccagcgcctcggaatgctcgaacggcatgtagcagaacatgcggtggtagtccgtcggcagcttgcggtccatgccggtggcgacgatgcgcctggccagtgccagcgccagcgtatcgctgccgaagctgcgcggatcgttgcggaacatgttgcgcgggaactggtccagcagcaccacgcgcgcgcaggcgccttcgggcgtgaccgaccagtcgtccggggccccgtcgcaggcgacctgccagtcggacaggaagttggtgcggatctgcgcatcgaaggcgtccgacttggtgaaccattgcgggcgctcggtattccaggcggcagaaccgggctggccgaaccagaaatcgagcaaacgcacggcgtcttcaggcagttggtctgtcatgaacttgcgaaacctttcggttgaaagaagggagcggcggcgcctcagcgcgccacgttgcgcatccagtcggcggtctggaagaacgcctgcatcaggcgcagctgcaggtcttcggacaggccgatgtcctgcattgccagcgccatgcagcgcatccactggtcgcgctcgctcacgccgatctcgaacggcatatggcgcgcgcgcaggcgcgggtggccgaagcgctcgataaagtggttgggaccgcccagccagccgcacaggaaccagaacagcttgtcgcgcgagccctccagcgagggcgggtgcagcgcgcgcagcccggcgaactgggtctccaggtccatcaggtcgtagaagcggtcgaccagctcgcgcacgcgcgcttcgccgcccaccagctcaaatgcagtcacctcggccgtgccgggcttgtcgttggattcagtactcatcacacactcaaacagcgcagccactcaggcatcacgcaaggtcgccagcgcgggctggcgcagcacttcgcgcaggcccagccagccgccggcaaaagcgcacagcatgccagaaaccacgcccaccggcacgatccaggcattgaagcggtacgggaaatcgaagacgaactgcgacaggccccagcccaccgcgatcgcgcccaggctggccaggaatccggccaggccgcccaccaccaggaactcggcgtactgggtctggcgcaccagcgcggccgaggcgcccagcgccttgagcaggcccgcgtcgcgcatgcgctcgtcacgcgcgccggacagcgccgcgtacagcacggtcacgccggcggccagcgtgaacacgaagaggaactccaccgccgcgatcacctggtccaggatgtcctggatctggcgcaggatcaggtcggtattgaccacggtgatgttggggaaggccgcgatcagccggttgcccagcgccgtgctggcgggcggcaggtggaacgacgtgatgtaggtctcgggcagcccctgcatcgcctgcggcggcaggatcacgaagaaattgacccgcatcgagccccagtccagcttgcgcagcgaggtcacgcgggcctgcaccgcctggccggccacgtcaaaacgcagcgtgtcgccaagccggatgcccagcgtcttggcgatgccctcttccaccgaggcgccggcgtccgggccgttggaccagcgcccggcaatcacgcggttgccctcgggcagcgcatcggtataggacaggttgaattcgcgctcgaccaggttgcgcgcgcgcccgtcctcgaagctgtcgccgcggatggcgcgctcgccgatatgggtcaggcgcccgcgcaccatcgggtagagcaggtcgttgatgccggcgccggccagcatctggcgcaacggttcgcgctggtccggctggatattgatgatgaagcggttgggcgcgtcggccggcgtggcctggcgccacgaatcgaccaggtcgttgcgggtcatgccgagcagcagcagcgccatcagccccaccgccagcgccacggtctgcagcaccgtgaccgcgcggcggcgttccagcactgccagcgcaaagcgccagcccatcgccgcgcgcccgcgcaggcgcccgcgcagcaggcgcgacagcagcgtcagcagccccagcgccagcaccgcgaagaccacgcccgcggcgacaaagccgcccgcggtggtcagccccagccgcaggtcgcgcgccgccaccagcagcagcgcgacaaaggcgcccaggcccagtgcataggccacccaggccgacaccggcggcaacccgatatcgcggcgcagcacccgcagcggcgccacccgtgccagcgccagcagcggcggcagcgcgaacccggccagcagcaccagccccgccagcacgcccaccagtgccggcagcagcgacggctgcggcagcgacacccgcagcagcccgcccagcgacagcagcaggccatagtgcgccaggtacccgagcagcaccccggcgagcgcgcccgcggcccccaccagcaggaactccaggccgaaggcgcgcaggatctgcccgcgcgacagccccaggcacttgtagaccgcgcaggcatcggtgtggcgctgcatatagcggcgcgccgacatggcgatggccaccgccgcgatcatcgacgacagcaccgccaccagcgacaggaagcgctcggcgcggtccagcgtggcacgcatctgcggctggcccgactccagcgactcgacccgggtattgcgcagcttgcggcgtccgatctcgtcctgcgcccatttctggaaggcagcgccggcggcgtcggggccggccaccagcagccggtaggtcacgcggctgccccagccgatcagcccggtgctgtccaggtccgacagcggcatcagcacgcgcggcgcgaagttcatgaagccggtgccgcgatcaagctcctgcgtgatgatgcggtcgatgcggaagctgcggctgcccagttgcagggtgtcgcccacggcaacccccagggcgcccagcagcgcctcgtcgacccataccgtgcccggcgcgggaatgccttcggcgggcgcatccggcgcccccgccgcactggccaccttgagcttgccccgcagcggatagccgtcggtcaccgccttgagcgcggccagctggctgggcgcgtcgccgccggccggcgccttgccgttggcagtcgccatgctcgggaaggtgacggtctgggccacggccagccccgccgcttgcgcacgctgcgcgaaggcggcatcgaaaggctggtcagccaccagcagtacgtcggacgcgatcatctggcgcgcgtcgcgctccaggcccagccgcatgcggtcggccatgaagcccacgctggtcagcgcggccacggccagcaccagcgcaaacagcagcaggtagagctcgccggcaatccagtcgcgccgcgccatgcgcagcgcctggcgccaggcggagaagcgaccgccatgcgcggggcgcgtgccggcggggttggcggccgtggccggggcttcgatggcggactcgggaggcatcggttgctttggttcttggtttctggcggcggcgcgcctcgggtcagtcgaaaaaaaacgggaatggccgggaagctagcgcggtgtgccaggccgctcggtcctgccgcgcaggctcgcatgcagccggcgcacgccgcgccacaatttcggcagcagccacaccgacaccagcaggaagaccaccagcaagatcaggaacaccaccggcaggaagaacgccagcagcaggctgccggtcgcggtcaggtcttcagtgaatgaggccgtccaattggagaacggttccggcgacacattgatcagcgcgcgcgtgcccgccttgaccgcatgcgcggtgccggccagcgtgccgccgatcagccctgccgccaccatccactgcggatccagctggccgaaggcggcggcggccaggatcgcgccggcgggaatgcggataaaggtatggatgccatcccagacggtatcgaacgcgggcaccttgtcggcgacgaattcggccacggccagcacggcggccacgccgatgacccaccaggattccagcggctgcagcccgggcggcaggtccagccagcccaggcgcgccagcacgccggcggccagcaccgcaaggtagaggcgaaagccgctggcccaggacatgcccgcggccagcgcggcggtttccagcatggcgctccttgcaagggtctggcgcaagccgatgcaaaaccgcggtgcgcctggcagggagtgtaatacggaccgggccgcgcagccgcgcgcccgtcggcgtcatgccgcccggctcgccctcaggcgtcctccttgccgcccggcccgaaccacggcaacgcctcctgcggggtcaggatgccggccggctcggccatggtgtagccgggcagcgtttcgatgcgccgggcaaaggccgggtcggccagcagcgccagcagtgctgccatccagccggcggtctggtcgttcttgcgcagcgccaggtagtaggcctcgcgcgtcaacggcacaaaggccagcccatgggcctcggcattcatgcgcagcccgaagcccacctgcgcgcggccgccgtgcacggcctcggccaccttctcgttgctgaactcggtctcgtcgtagccggcgatctggtcggggtacaggccctgcgcggccagcagctggtcgaacagcatgcgcgtgcccgaactgcgctgccggttgacgaagcgcgcctgggtgcgcgccaggtcgcgcaggtcatgcacctcgcgcgccacctccggcgccaggatcaggccctgctcgcgccaagccagccgcagcagccgcaccgcggccggccgcagccacttgcgcagcgtcacatgcgcgaccgagcccgcggtctgcaccggcgagacatagaagccggccagttccgactgccgctcctgcaggcaaatcagcccctccacgctaccgcaaaacaccgtatcgagctgcagcgaggttcctgcctcgcccagtgcggcggccagcacctccaccgccgggtcatggctgccggtgaaatgcacctgcgactgcggctgctgggcatcgtccagctcggcaatgaagtccgccatggccttctgcaccaccgggtcgaccgattcgcgcaggcgcagctcggcgcgcagcaggcgttcgccgaagcgggtcagcgaggcaccgcggccgcgctccatatcgagcacgctgcgcccgagcatttcctcccaggtccgcatcacgccccaggcatggcggtacgacaagccgatctcgcgcgcggcgcggtgcagcgacccggtttcgcgcacggccttgagcagctggaacaccttgccattcgcgcgcggattgtcgtctggcgcgatcaccggaaacaggtcaaagcggaagatcatatgtcctccgcagcatatttacttgtcgatctcggctggaccacaatgaataccccattcttatgttcttttgccgcattctccatgagatcgaaaggcaaaagcaattatgtctggaaaaacataatacaaaggagccaccgcatgtcgcctcgccttgcccaacgcctgcgccgcccagcgcgccatctcgttgcgatggcctgcgcaggcctgctgtcggcggcccatgccggggaactgaagctggccaccaccaccagcaccgagaactcgggcctgctgaaatacctgctgccgcgcttcgagcaaaaggcgggcgtcaccgtgaaggtgatcgcggtcggctcgggcaaggccatgaagatgggcgagatgggcgacgtcgacgtgctgctggtgcacgcgcgcaaggtggaagacgcctttgtcgcggccggctacggcgtgaaccgccgcgacgtgatgtacaacgacttcatcgtggtcggcccggccagcgacccggcaggcgtcaagggcggcaaggacgtgctggcggggttccgcaagctcgccggcagcagcagcaagttcatctcgcgcggcgacaactccggcaccgacgtgatggagaaggactactggaagcagctcggcatcgagcccaagggccagccgtggtacgtcaacgccggcctgggcatgggcgaggtgctgaccatggccgcgcagatgccggcctatacgctgtcggaccgcgccacctacggcgcctatcgcgccaagaccggcctggccatcgccatcgaaggcgatccgaagatgttcaacccgtacggaatcatcgcggtcaaccccgccaggcatgcgggtatcaaccacacggatgcgatcaagctggtggagtggatcacgtcaaaggaaggacaggacgcgattgccgggtacaaggtggaaggcgagcagttgttcttcccgagctacaaggcaaagtaagccccctcgcctgctgcccggcccgctcagccggcctctgcctccagccgcggcaactgcggcaggtccgccgccacctcggcgatcatgcgccggatccacatcacatccggcgccgcatggcagcgctcgtgccacagctggtagaagcgcatgcgcgggaacgacaccggcgagggcaccatgcggatcggcaggtactgcgcgtagtgcgcagcaaactggcgaccggtggtaaagaccatatccgtcttcatcagcacatacggcaccaggccgaaatacggcagcgtgacctggatattgcgcttgtagccctgctcggccagcgcctggtcgatcatgctgcgctgcatcgacgcatacggcgccggggccaagtgcggcatctccaggtagtgcttgagcgtcagccccttgcgcgccagcggatgctgcgcgcccagcatgcacaccacctcgtcgtcgaacagcggcgagatatgcaggtgctcaggcggcgacagccagttgccgaccacgatatcgagctgcccctgctccaggtcgtccaggaagtccgacgacgacgtcatcggatgcacgaacagcttggcgcccggcgccagccggcgcacgcgctcgacgatattgggcaggaagaacgcgtccaggtagtccggcgcgcccaggtggaaggtgcgcgtggtggtggccgggtcgaactgctgcggcgggcgcgcgatgcggtccatcgccgccaggctctgctcggccagcgccagcagttcgcggccgcgctcggtcggcaccatgccgtttttgccccgcaccaaaatggcatcgccggtgatctcccgcaggcgcttcagggtattgctgatggcgggctgggactggcccaggcgcacggccgtgcgggtcacgctctgctcggtcagcagggtgtgaagcacccgcagcaaatatgtatcgagatggtcgcgtccgtgcatggcgatggcggccctccggcgggggccagatgggtggcgtgggggatgggaacggcgcatagtgtatgacaggcgccccacaaacggtcaaatcacctcctccaggggggcgcctggcggtgcggcggggcaccaatcgggccgcccgctgatggggcatatcacctgggccgaatattgcatgaaaggccagggtgctatgtttccgccatcaccaagagagagaagaccatggagacgcaaaccatccgctttttccaccgcggccaggtcaaggaagtatccgacgcccccattacccgcaccgtgctgcagtacctgcgtgaagacgcgcgctgcaccggcaccaaggaaggctgcgccgaaggcgactgcggcgcctgcaccgtcgtggtcggcgagctgcaggacggcggcgatgtcgaattcaaggcggtcaacgcctgcatccagttcctgcccacgctcgacggcaaggccctgatcacggtcgaggacctgcgccaggccgacggcaacctgcacccggtgcaggaagccatggtcgagtgccacggctcgcagtgcggcttctgcactcccggcttcgtgatgtcgctgtgggcgctgtaccagcagcacaccccgggcggcgaagcgccctcgcgccagaccatctgcgacgcgctgaccggcaacctgtgccgctgcaccggctaccgcccgatcatcgacgccggcgagcgcatgatggccctgcccgcccctacggcggacaagctcaaccccaagcagatcgccgacaccctgcgcaacctcaagcgcggcgagaccttccgctaccgcgcccagggccaggagttctttgccccgcgcagcgcggccgagttcggcgcgatcaaggcggcacagcccgatatccgcatcctggccggcagcaccgacgtgggcctgtgggtcaccaagcagttccgcgagctgggcaacctgctctacgtgggccaggtggaagacctgaaccacattgaggaacgcgacggcatggtcgagatcggcgccgccgtgacgctggaaaaggcctacgccgcactcaacgccgcacaccccgagctggaagagatgtggaagcgctttgcctcgctgccgatccgcaatgccggcacgctgggcggcaatatcgccaacggttcgcccatcggcgactcgatgccggcgctgatcgcgctgggcacggaagtggtgctgcagcacggcgagacgcgccgcacgctgccgctggaagacctgtacctggcctaccagaagaccgcgatgcagccgggcgaattcgtcgccgcgctgcgcgtgccggtggccggcccgcagcacttccgcacctacaagctgtccaaacgctttgatgaggatatttccgccgtgtgtgccgcattcggcatcaccgtgcaggacggcctcgtcacgcaggcgcgcatcgccttcggcggcatggccgccacgcccaagcgcgccgccgccaccgaggcggccctgaccggccagccgtgggatgaagccaccgcccgcgccggcatggccgcgctggcgcaggactacacgccgctgtccgacatgcgcgcgaccgcgtcttaccgcagccgcggtgccgccaacctgctgtaccgcttctggctggagacccgcgccgaagcgctgtccgcggcagccgtcaacgtccgcgccatcggcgccggcgccactgaaaccgccacggcctgagccagagaaaaaggaaagcatcggcatgaacaagcaaaccgaacccttcctgctcgacgccaccgccgaacaggtctcgcaggtcggcatctcgcgtccgcatgaatccgcccacctgcacgtggccggcaccgccacctacacggacgacatccccgagctggccggcacgctgcacgccgcgctcggcatgagtacccgcgcgcacgcccgcatcaagtcgatctcgctcgacaaggtgcgcgccgcgcccggcgtggtcgacgtgctgacggtggacgacatccccggcaccaacgactgcggcccgatcatccacgacgacccgatcctggcgcgcgacgtggtccagttcatcggccagccggtctttatcgtggtggcgacctcgcatgacgccgcgcgccgcgccgcccgcctgggcaccatcgactacgaagacctgcccccggtgctgtcgccgcaagccgcgcacgaggccggcagctatgtgctgccgccgatgcacctgacgcgcggcgagcccgctgcgcgcatcgcaagcgcggcccaccaggacagcggcaagatccacctgggcggccaggagcagttctacctggaaggccagatctcgtacgccgcgccgcgcgagaacgacggcatgcaagtgtggtgctcgacccagcacccgaccgaaatgcagcacgcggtgtgccatatgctcggctggcaggcgcaccaggtgctggtcgaatgccgccgcatgggcggcggcttcggcggcaaggagtcgcagtcggcgctgttcgcctgctgcgccgcgctggccgcctggaagctgatgtgcccggtcaagctgcgcccggaccgcgacgacgacatgatgatcaccggcaagcgccatgacttcgtgttcgactacaccgtgggccacgacgatgaaggccatatcgagggcgtcaaggtcgagatggtgtcgcgcgccggcttctcggccgacctgtcgggcccggtgatgacccgcgccatctgccacttcgacaatgcctactggctgccgaacgtgcagatcgacggctactgcggcaagaccaacacgcagagcaataccgccttccgcggtttcggcggcccgcagggcgcgttcgcggtcgagtacatcctggacaatgtcgcccgcacggtcggcaaggattcgctggacgtgcgccgcgccaacttctacggcaagaccgagcacaacgtcacgccctacggccagaccgtggaagacaacgtcatccacgagctgatcgacgaactggtggccagcagcgaataccgcgcccgccgcgaggccacgcgcgcgttcaacgccaccagcccggtgctgaagaagggcatcgccatcaccccggtgaagttcggcatctcgttcaacgtggcccacttcaaccaggccggcgcgctggtgcacgtctacaacgacggctcggtgctggtgaaccacggcggcaccgagatgggccagggcctgaacaccaaggtggcgatggtggtggcgcatgagctcggcatccgcatggaacgcgtgcgcgtgaccgcgaccgataccagcaaggtggccaatacctcggccaccgcagcttccaccggtgccgacctgaacggcaaggccgcgcaggacgccgcgcgccagatccgcgagcgcctggccgtgtttgccgcgcgcaaggccggcgtggagccgtccgaggtgcgcttcaacgatgacctggtcagcgccggcgagctgcgcgtgtcgttcggcgagctggcgcgcgaagcctacgtggcgcgcgtgcagctgtggtccgacggcttctacaccacgcccaagctgcactgggaccagagcaagctgcagggccgcccgttctactacttcgcctacggtgccgcgtgctctgaggtgctggtcgacacgctcaccggcgaatggaagctgctgcgcgccgacgcgctgcacgacgccggccgctcgctgaacccggcgatcgacatcggccaggtcgagggcgcttttatccagggaatgggctggctgaccaccgaggaattgtggtggaacaaggacggcaagctgatgacgcacgccccgtccacgtacaagatcccgacggtcaacgactgcccggaggaattcaacgtgcgcctgttccagaaccgcaacgtcgaggacagcatccaccgctccaaggccgtgggcgagccgccgctgctgctgccgttctcggtgttcttcgcgatccgcgacgccgtggctgccgttggcgactaccgcatcaacccgccgctgaaggccccggccaccagcgaggcgatcctggacgccgtcgacgccgtgcgcgaagccgcggcgcagccagcctgagctggcggaacgatcgcaggaagcgcgcgcctgcgggcgcccccggactttccccccttggccgcgttgacgggcatggggccggtggaagaagcaggcgcgcgccacccttgcgatgacacagcgcaggcagcaccacagcatcaagcagcaaccaggcaacaccgacaaggcccccgacatgcaggacgcaccgctcaaacccttccgcttcgccgacgccgcccgcatggtgcgcgccggcctgccggcggcgatggtcaccatcgtcgaggtcaagggctcggccccgcgcgaggccggcatccgcatgctggtcagcgccgacgacctggtcggcaccatcggcggcggccacctggagtggcgcggcatggatatcgcgcgcgagatgctggtgcgcggtgaacaacgccggatcgagcgcatcccgctcgggccggcactgggccagtgctgcggcggcgtggtgcagctcgcattcgaggtgctgggcgaagccgacctgcactggcttgacgcggtcgaacgcaatttcaccgccggcaaggcactgcagcgccaggtgccggccagcggcgcgatcacccatggcgacagccatgccgtgacccccggcgtaacgctgcacgccgacggcagctggaccgatacgctggtgcccgacaccatgcacgtggtgctgtttggcgcgggccatgtcggccatgcactggtcaaggtgctggccacgctgccgtgccgcgtgcactgggtcgacgagcgcgacacgctgttccccggcgggctgcccgacaatgtcgaggccgaggccagcgacacgcccgaagcggtagtggcgcaggcgcccgcgggcagctacttcctggtcatgacgcacagccatgcgctggaccagaccctgtgcgaagaaatcctcaagcgcaccgatttcgcctacttcggcctgatcggctccaagaccaagcgcgcgcgctttgaacaccgcatggccgagcacggcatcgacccggcccggtttgcggaaatgacatgccccatgggggttcccgggattaccgacaaggctccggctatgattgcggtagccatcgtcgcccagctgctccaggtccgcgaacagcgccttgccgcgctgcgtctgggccgcccggaggcggtgcatccctgaacccgtgccgccggccccgccggcaggcacagaaaagcccagaaacgaggcccccatgaccatcgatgccgcgctcgcggaacagatccgccgcactcccaaggccgaactgcatgtgcatatcgaaggcacgcttgagccggaactgatcttccggctcgcgcagcgcaaccaggtggcgctgccctatcccagcgtcgaggcgctgcgcgccgcctacgccttcaccgacctgcagtcgttcctggacatctactacgccggcgccagcgtgctgctgaccgaggaagatttcttcgacatgaccatggactacgtcaagcgcgccgtcgccgacaacgtccgccacgccgagatcttcttcgatccgcagacccataccgcgcgcggcgtgcccatcggcgtggtgatcgacggcatcgccgatgccctggcccaggcgcgcaccgaatatgacttctccagcagcctgatcctgtgcttcctgcgccatctgccggaggaagacgccttcgccacgctggaggccgcgctgccctaccgcgaccgctttgtcggcgtgggcctggattcgtccgagcgaggcaacccgcccgagaagttcgcgcgcgtgttcgccagggcgcgcgagctgggcctgcacctggtggcccacgcgggcgaggaaggtccggcgcaatacgtcaccgacgcgctcgacatcctcaaggcgcagcgtatcgaccacggcgtgcgcgccatcgacgatccggcgctggtggaacgcctggcgcgcgagcgcgtggcgctgaccgtgtgcccgctgtcgaacgtcaagctcaaggtctacccggacctgcgcgaccacccgctcaagcgcatgctcgatgccggcgtggtgatcacgctgcattcggacgatcctgcctacttcggcggctatatgaacgccaactgggaagccaccttcgaggcgctgccgctggacgcggccgatgcccacaagcttgcccgcaacagctttgaagcggccttcctgcctgccatgcagaaggccgaattcctggcggaagtcgaccacttctggtcgagcccgcccaagtccccgcccgcaacggccccagcggcctgagcgcggcgcatgccaatagcccggcccgctgcttgaaccatgccgttccgcgcgggccggccacaagagacacaccatgacgaccaaccccaagactgactccctcacccgtgccattcgcggccgcgtgctgcatttcctgcgcgatccgcaattccatgaggatgcatatcagtattgggacgacggggtgctgatcgtcaccaacgggcgcatcgccgctgccggcgactatacgcagctggctgcgcgcattccggccgacgccgagatcgtcgaccaccgcggcaagctgatcgtgcccggctttatcgacacccacgtgcactacccgcagaccgacatgatcgcgtcgccgtcgccgggcctgctgcactggctcgagacctacaccttccccgaagagcgccgctttgccgatcccgactacgcgcgcggcgtggccggcttcttcaccgaggaactgctgcgcaacggcaccaccagcgcggtggtctggagcacggtgcacaaggcctcggccgaggccctctttgccgaaagcgaggcgcgcaacctgcgcatggtcacgggcaaggtgatgatggaccgcaactgcccggaattcctgcgcgatacggccgagaccggtgcccgggactccgccgacctgctctcgcgctggcataacaagggacgcctggcctacgccatcacaccgcgctttgccccgacctcgaccgaggcgcagctggccgcctgcggcgagctggcgcgcgcctatccggacgcctttatccagacccacgtggccgagaaccgcgacgaggtcaaatgggtggccgagctgttcccggacgcgcgcagctacctggacgtgtacgaccgctacggcctgctgcgcccgggcgcgatgtacggccacgccatctacctggaccaggacgaccgccggcgcctggccgacagcggcgccgcggtggcgcattgccccacctccaacctgttcctgggcagcggcttctatgacttccaccagtccgacgccaaccgcctgaacgtgacgctggccaccgacgtcggcggcggcacctcgttctcgatgttccgcaccatgaacgcggcgcacaaggtggcgcgcatgggcggctactacctgaccgcgctgcgcatgttctacctggccacccgcgccgcggccgaggcgctgggctggaccgaccgcgtcggcagcttcagcgttggctgcgaggccgatttcattgtgctggaccccaaggccacgccgctgatcgcccgccgcagcaaccgctcggaaacgctggaagaagagctgttcgcctttgccatgctgggcgacgaccgcgtcatcgacagcgtctatgtgatgggcgaggccgcccacgtgccggccgcctgatccgtcacctggccagcagccgcccgccgccatgcggcgggcgcgcttttaccgcttcgcccccgcctccggcttgacgaccgtcaaggccgtcttcgacaaagccttctaaccttgcggttccgccgcggccgttctgcgcgccgtgcgcccttacccatccgaccgcaatcagaaggttccgcatgaccgctttccaatccgccgctcacgcccctgagcgcgccagtggcccgcatgacgtgccccatgccgcgcgcaagggcgcgcccaaccacgccccgctgccggagccgattgcgccggacgccccgctgccctcgcgcaagatcatccgcggctggctgatcccgctgggccagcgcagcacgccgcgcgcactgctgctgttcgccttcgactacctgttgttcggcgccgtgctggccggcgtggtgctggcgcagcactgggccgccaagctggcgctgggcgtgctggccgggctgatcatcgcgcgcctgtttatcatcggccacgatgcctgccaccagagcctgaccccgcgccgcggcctgaacaagtggctgggccggctcaccttcctgccctcgctgacgccgtacagcctgtgggaagtcggccacaacgtggtgcaccatggctataccaacctgaagggcttcgacttcgtctgggcgccctactcactggaagaattcaacgcgctgccgcgctggcgccgcgtgatggagcgcatctaccgcaccggcttcggcccgggcctgtactacctggtggaaatctggtggtgcaagatgttcttccccagcaagcgccagatggctacgcgccgcccgatcttcaccggcgactgtgtgctggtagccgccttcgggctggcctggatcggcgcgctggcgggcctggcgctggccacggagcagtcggtgtggttgctgaccggcgcgggctttgtgctgccattcctggtctggaacgtcaccgtcggcttcgtgctgtatgtgcaccacacccacaccagcgtcgcctggtatgacaccaaggccatgtgggccaaggcacagccctttgtctcgaccaccgtgcacctgcgcttccgccacggcatcggcgcggcgctgcaccacatcatggaacacaccgcgcaccacgtcgacatgagcgtgccactgtaccgcctcaagcgcgcccaggcactgctggagcacgcgctgccgggccgcatcatcatcgagaacttctcctggcgctggtatttcgataccgcgcgccgctgcaagctctatgacttcaaggccctgtgctggaccgatttccgcggccgccagaccagcgacaacgcgcctgtacccggctgagggtgcaggccttgtggcgggggcaggtggacgcctgcccccgccgccgctataattgccgcttccattggggagtagccgccctgctctcaccgcgccgcgcaatgcggactccgggggacaggggcgtacgtcaacagacttgaccgcttgcggttatggcgtgcgcagctccggacccgcccggccgtactgatacggacccggcagcgtccagcctggcgagaccgatgaccatacctttctggccgggccgggaaaggtgtgcgtcattggcatctcgcgatgcattgcggcccggttaccccacaagaccaatatggaagccttcctcgtctccacaggcatcgtcgccctcgctgaaatgggcgacaagacgcaattgctgtcgctggtgctggccgcgcgctaccgcaagcccgttcccatcatccttggcatcctgatcgccacgctgttcaaccacggctttgccggtgcgctcggcggctggatcacgcatgtgctgggcgaaagcctgctgcgctggatcctgggcctgggctttatcgcaatggcggcatggatgctgatccccgacaagctcgacgacgccgaacaagccaggccggtcaagggcgcccttggcatcctcggcaccaccatcgtggccttcttctttgccgagatgggcgacaagacccagatcgccaccgtggcgctggccgcgcgcttcagcgatgcggtgattgccgtggtggccggcaccaccttcggcatgatggtcgccaatgcgccggcggtcctgcttggcgacaagtttgccaacaagatgccgatcggactggtgcacaagatcgcggcggggattttcctggtgctgggggtgctggcgttgctgaatatcggcggataagtcgccgaaaaaaaacggggcacaaggccccgttcaaaccctcgccggtccggtactgacggttgccaactgcacaaccctccggaccgtcgatcaccgatgctcggaattcgcgggccggcggcacgcgccggccctgatgcttttcagatcaggccaccctcagttggtggtcttggcaccgccttcgaaccactggcccagcagggcgcgttcgtcgtcggtgatctgcgtcacgttgcccagcggcatcgccttctgctgcacggcctgctggtagatcagctgcgcgtgggccttgatgtcttccgcggtatcgagcttgatgcccttggctgcggtcggcatcatcttcggctgctcggcgtggcactgcacgcagcgtgcgttcatcacttcctgcaccttggcaaagctgacggcggtggcggcttcaccaccttctgccttggccacggccgggcgcggttgcggcgcgatcagcacggcgaccacggccagcacggcaacgccggctgcgggccaggccacgttgatcttgcccttgtgcttgaggatgaagaactggcggatcagcacaccggcgagcatgatcaggatcagcgcggcccagttgtacttgtagctgtaggtcatgctgtagtggttcgacagcatcgcgaacagcaccggcagcgtgaagtacgtgttgtgcacgctgcgctgcttggcgttcttgccatggaccggatcgaccggctggcccgcgcgcagcgcggcaaccaccttgcgctggcccgggatgatccacaccagcacgttggcgctcatgatggtggcgatcatcgcaccggtcagcaggaacgccgcacggcccgagaacaggtggcacgccacgtaggcagccacggccacgtagatcgccaccagcacgcccacggtcttgtcgctcttgccgaacacgcggcagatcacgtcatagaccacccagcccgcggccaggtaggacagcgccaggccgaccgccgcgccgggcgacatgtcgtagacgttcttgtcgatcaggaacgtgctggcgttgaacaggtacagcaccaccagcaggccgaagccggtcatccacgtggaatacgactcccagtagaaccagtgcaggttctcaggcagcgtcttgggtgcggtcaggtatttctgcgggttgtagaaaccgccgccgtgcacggcccacagctcgccgccgacacccttctcctgcaggtcaggatcggtgggacgggtcaggctgttgtcgagccagacgaaatagaacgaggagccgatccacgcgatcgccgtgatgacgtgcacccagcgcagcagcagattggcccagtcgagaatgtagccttccatgtcttgtctcctgtttccctatgccaccgcttcagctgccgcggtaggtcgagtacgaccagggcgagaccaggaggggcacgtggtagtgcgcgttgacatcggcaatgccgaagcgcaggggcaccacgtccaggaaagccggctcgggcagctgcgtgccttgcgcgcggaagtagtcgcccgcggcgaattccagctcatacacgccaacggcgaagtccgcaccttccagcagcggctggtcgcaacggccgtcgtggttcgtcacgactgtcttcagggtttcgcggcgattgtcgacaattttatgaagagtaaccaacatgcccttgccgggcgtgccggcagcggtgtcgagtacgtgtgtggtcaagcgtcccatcgtgtttttccttaggcgattgggttgtgaggggcgccgctgccttcactagcaccatttgtgggaatggtgcccgctcggtacgtctggtaacgcatcccggcgctgggtggtgcgtggcgacaatgcgcctgcactacccggttggcaattcagggatttccctgagttgtcgaaaacctgagtcggttttgttgacaatattggagcagtaaccaaataattgtcaacaatttttggatcaccgctgcctgatgtccaggatttgcggtgccccgcctgactgctggtgccacgatgtccaagagcctgaagctgattgccgccaacgccgaaaccaaggccgacgccgagccgaccgaaatccaggcgggcaagcccgccaggcccgcacgcaagggctcggtcgaagagcgcatgtatcacgagatctacgacgcgatcatggagcaccggctgccgccgcgcaccaagctgaccgagcattccctttgcgagatctatgccaccgcgcgacacactgtgcgcaaggtgctgtcgcacctggccgccgacggcatggtcgacctcgagcccaaccgcggcgcctttatcgccagcccctccaccgacgaagcgcacgacatgttcgagctgcgccagatgctggaacgcgcggtgctggaaaagcttgccggcatgcccgacgtcaaggccgtgatcgcgccgctgcgccagatggtggccagcgagcgccaggccttcctcacgcatgaccggcccaaatggatccgcctgtccgccgagttccatacggcgctggcggaactgtcgggcaatgcgctgctggtcaacatgatgcgccggctggtgtcgcgcaccacgctgatgatcgccagcgtggaagccccgggcaacaacgcctgctcgttcgatgaacacgaagagatcctcgacgcactcgaacagggcaatgccgcgctggcccagtcgcgcatggcgcaccaccttggcgcctgcgccgaccgcgtgcagccggacgagccgggcaactttgatcttcgcagcgtgctaggccgctccacctagcacggtgttcccgcccctgcccccaactacaaggccagacctgatcggcaaacagcacccggctcaccgacgagagtgctgagacgacaggcagataacggtccggagaccctccgggatccaggaccggggccatggcagtggtgttcccatcaaaccaaaggagaggagacgcacccatgaattccgcaagcaccacggtcccgacggacctcaccaacgagcgtttgccttccgggcgcctgctcgcgctcgggttgcagcacgttctggtgatgtacgccggcacggttgccgtgcccttgatcgttggtggcgcgctcaagctgcccaaggaccagctggcgttcctgatcaacgccgacctgttcgccgcgggcctggccacgctgatccaggcctttggtttctggaagttcggcatccgcctgccggtgatgatgggcgtgactttcgcctcggtggcgccgatgatcgccatcggcaccgatcccaatgtcggcctgctcggcatctatggcgcggtgatcgcatcggggatattcggcatcctgatcgcgccgatgatggggcgcatgctgggactgttcccgccggtggtgaccggcacggtgatcacgctgatcggcgtgtcgctgatgcgcgtgggcatcaactgggcggccggcggccagcccaccacccgtgccgtgatcgacggcgtggtcaaggaggtgcccaacctcgcctacggcgacctggccaacctcggcattgccggcctgacgctgctgatcatcctgctgctgaccaagtacggccgtggcctggtggccaactgcgcagtgctgctgggcatcatcgccggcacgctggtggcgatggcgatgggcaaggtgtccttcgaaggcctggatgaagctagcttcgtcgccgtcatcacgccgctgcacttcggcatgccgaccttcgaagtgaccgccatcctgtcgatgtgcatcgtcatgctgattacgctggtggagtccaccggcatgttcctggcgctgtccgacatcaccggcaagaagctgagcaacgaggacctgacccgcggcctgcgcgccgacggcctgggcaccgtgatcggcggcatcttcaacaccttcccgtatacctcgttctcgcagaacgtgggcctggtgacggtgaccggcgtgcgctcgcgctacgtggcggctgccggcggcatcatcctgatcgccttcggcctgttccccaagatggcccacgtggtggcctcggtgccgcagttcgtgctgggcggcgccggcatcgtgatgttcggcatggtggccgccaccggcatccgcatcctgggttcgtgcgatttcaaccgcaaccgccacaacctgttcatcgtcgccatctcgatcggcgccggcatgatcccgacgctggcaccgaccttcttccagtacctgccgaagtggaccgggccgttcacccacagcggcatcgtgctgggcacgatcgtggccgtggcgctgaacctgttctacaacggcatccagtcgcgcgaggaggccatgcgcaacgccgccgccaactcgcacggcaccgagtaactgaagcaacggtatcgaagtatccgacaccgccgccggcacgactggcacgttcattgcgtgatggtcggcgcttgcgggcggcgcggcggtgccgggcgttttcctgaagcaagcaaagacacatgacaaaagataactatccacgcgatctcatcggatatggtgcccggccgccgcacgcccgctggccgggcggtgcgcgcgttgcgctgcagttcgtcctcaactacgaagaaggcggcgaaaactgcgtgctgcacggcgacgccgcctccgagcagttcctctccgagatcgtcggcgccgcggcctaccccgaccgccacatgagcatggagggcatctacgaatacggctcgcgcgccggcgtctggcgcctgctgcgcgagttcgagaagcgcggcctgccgctgaccatcttcggcgtatcgatggcgctgcaacgccatcctgaactgacccgcgcctttgtcgaactgggccacgagatcgcctgccacggctggcgctggatccactaccagggcatcgacgaagccaccgagcgcgagcacatgcgcatcggcatgcagatcatcaaggacctgaccggcgaactgccgctgggctggtacaccggccgcgacagccccaacacgcgccgcctggtggtggagcacggcggcctcctgtacgactcggactactacggcgacgacctgcccttctggaccgaagtggaagtcaccggcggcgagaagaagccgcacctggtggtgccgtacacgctcgactccaacgacatgcgctttgccacgccgcagggcttcaataccggcgaacagttcttccagtacctgaaggatgcgttcgacgtcttgtatgaggaaggcgacccgagcggccaggacagccccaagatgctgtcgatcggcatgcactgccgcctgctcggccgcccgggccgcttccgcgcgctgcagcgctttctcgactatgtgcagggacacgacaaggtgtggatctgccgccgtgtcgacatcgcccgccactgggccgatacccacccctacaccccccggaaccaagcatgagccagacctgcaccatcgcccaactcaacaccatgcctgtcgcggagttcgtgcaggtgctgggcggcatctacgaacactcgccgtggtttgccgagaccgcagccgcgcagcggcccttcgccgacggcgcagcgctggcgcaggcactgcgcaaggcggtcgatgaagcgggcgaggcggcccagctcaagctggtgcgcgcccacccggagctggccggcaaggccgccgtgcgcggcgagctgaccgccgaatccacgcgcgaacaaagcggcgccggcctgaacctgtgcacgcccgaggagttcgaccgcctgcagtcgctcaacgcggcctacaaccagaagttcggcttcccgttcatcctggccgtgcgcggctacgaccgccacgggatcatcgcggagttcgcgcggcgactggaaaacacgccgcagcaagagttgcaaacttgcatcaaccagatccatcgcattgcgcagttccggcttgacgacttagtatccgcctgagcaaaaaagcgtcacctgtataacaaaaaacgctgtacccgatgccgccggcacccatgcaccacccctcaccgagccaagccaggcggcacgaataaaagcaccaagacattagaagaacccgacagggacccagtacacaacgttccaagcaggatcaaaaaccacggaggtctaacaatgcagaagcagtacaagccggcactaaagctggcggcagtagcggctacccttttttccggtgcggccatggcccagtccagcgtcacgctgtacggccaggctgacatgttcatcggcggcgtcaagagcccgggttcgggcgagcgcgcatgggtggccaactcgggcggtatgcagacgtcctactggggcatcaagggcaccgaagacctgggcggcggcaccaaggccatcttcgacctgaacgggttcttccgcacggacagcggcaacagcggccgcttcaccggcgactcgatgttcagccgcaacgcgtacgtcggcctgcagaatgacaagctgggtacgttgaagctgggccgcaacaccaccccgtacttcatctcgaccatcctgttcaacccgctggtcgactcgtacgtgttctcgccgaccatcttccacacctacttcggtgcggccagcaacggcgtggtggatccgggcatcatcggcgactcgggctggagcaactcggtgctgtactccaccccgaacttcggcggcctgagcgcgaacctgatctactcggcaggcgagaaggcaggtgctgcgggccagaacaaatggggcggcaacctgatgtacttcaacgggccgttcgccgcgaccgtcgcgttccagcaggtccgcttcaacgcggttccggacgacctgtcggtagcaggcctgagccgccaggacgctgtgctgggcggcatcacatacgacttcaaggtggtcaagctgttcgcccagggccagtacatcaagaccaaggccagcacggccgccagcggcgacatcaagcacaccaacggtcaggtcggggcctcggtgccggtcggtgccggcagcgtactggcgtcctacgcctatggcaagaccgagaacgcgatcggtgacttcaagcgcaacacgtttgccgtcgcctacgactacaacctgtccaagcgcaccgacgtctacgccgcctactactacgacaagatcaccggcatcgagcacggcgataccttcggcgtgggcatgcgtcacaagttctgatgacgtaaccgcctcaccggcagtcctggagcccgcccttccggcgggctttttcattgccgcgttgacatcacactgcgccgaaattaggcgccagaatgctgcgccgcgccatcccatgccgtcgggcagtatggatcggaagccggtatttcataggtggattcaattggaagcgctctttgacgcttcctagattggtgatccggacctcaaaaacgacattgagagaggtgattcatgcggcgatacccgaagacccgttccgaactgatggccatcctgaaccagtgcctcgacaacaaccccgagtgcggcgaatgcgaactgcacgcggtgcgaatgcaccagcctgaccataccggatgcaactggagcgccgaggtcgatttcccgcaagaatccgtcgacaacctgggcacgcagctcgccgcggccaagtcgatcattgtcgtgatgcgcgagcagtacaacgtgctgcaatagccaccgatcccgcagcgcgccgtgcgcgcttgccgcggggcagcatcaaagaaaaagccgggtcaccagacccggctttttgcattggctcacgcccgtcaggacatcagcgcaccgcgttgctctccgccacggccacggccgtcatgttgacgatgcggcgcgtagtggcttgcgggttcaggatgtgcaccggcttggccgcgcccagcaggatcgggcccaccgtgacgccctgaccgcccgtgatcttgagcaggttgaaggcgatattggcggcgtccagcgtcggcatcaccagcaggttggcgctgccggccagcttggtcgacggcaggaagtggcggcgcacgtcttcgtccagggcagcgtcgccctgcatctcgccttccacttccaggtgcggagccaccttggcaaggatccccgcggcctcgcgcatcttgcgcgccgacggacgggtagaggagccgaacatcgagtgcgacatcagcgcgaccttgggaacgaggccgaaacgcgcgatttcctcagcggccagttgcgtgatcgcggccagttcatcggcggtgggatcgtcgttgacgaaggtgtcggtgatgaacagcgtatgcttttccagcatcagcgcgttcatcgcggcgaacaccttggcgcccggcgccaggccgatcacgtcgcgcacgtgctcgaggtgtgcctcgaagcggcccaccgtgccgcacagcagcgcatcggcatcgcccatatgcatcagcatggcgccgatcagcgtgttggagcggcgcagtgccaccttggccatgtccggcgtcacgccgtcgcggccgcgcagcgcgtggtaggcctcgtggtaggcgcgatagcgtgggtcttcttccggattgaccagatcgaagtccaccccggccttgaggcgcaggccggccttctcgatgcgcatctggatcacgtgcgggcggccgatcagggtggggcgggccagcccttcgtcgaccacggtctgcacggcacgcagcacgcgctcttcctcgccctcggcgtaggcaacgcgcttgggcgcagccttggcggccgagaataccggcttcatgatcaggccggtgtgatagacataggtggacagctgctggcgatacgcctcgagatccttgatcgggcgcgtggccacgccggattcttccgcggccttggccaccgccggcgcgatcttctcgatcaggcgctggtcgaacggcgtcgggatgatgtagtccgggccgaacttcagctcgcggccgccgtaggcggcggcaacggcgtcgttgagttcggcctcggccagctcggcgatggccttgacgcaggccagcttcatcgcttccgtgatcttggtcgcgccgcaatccagcgcgccgcggaagatgtacgggaagcacagcacgttgttgacctggttcgggtagtccgaacggccagtggcgatgatgcagtccgggcgcgcggccttggccacttccgggcggatttccggctcggggttggccagcgccaggatgatgggcttgtcggccatggtcttgaccatctcggcggtcagcacgccggcggtcgagcaacccaggaagacgtcggcgtccttgacgatgtcagccagcgtgcgcgccgaggtgtcctgcgcgtagcgcgccttgttggcttccatgttggcgtcgcggccaacatagatcacgcccttggagtccaccaccgagatgttctcgcgcttcacgccgaggctgaccatggtgtccaggcaggcaatggcagccgcgccggcgccggacacggccagcttcaccttggccacgtccttgccgaccaccttcaggccattgagcagcgccgcggtggaaatgatggcggtgccgtgctggtcgtcgtggaagacggggatgttcatgcgctcgcgcagcttctgctcgatgtagaagcactccggcgccttgatgtcttccaggttcacgccgcccagcgtgggctcgagcgcggcaacgatctcgacgatcttgtccgggtcgcgcgcgtcgagctcgatgtcgaacacatcgatgccggcgaacttcttgaacaggcagcccttgccctccatcaccggcttgccggccagcgggccgatatcgcccaggcccagcacggcggtgccgttggtgaccacggccaccaggttggcgcgcgaggtgtactcggcggcagtggcgggatccttggcgatttcctcgcaggcataggccacgcccggcgaataggccagcgacaggtcgcgctggttggacagcgccttggtcgcggttacctggatctttcccttggtggggctgcgatggtattccagcgcggcgaggcgcaattgcgcttcaggactgttcggggcatgttgcggtgcatcaccgctattcttgctgctcattggctcgtccggaaaatggcccggaccggaagcgcccctctccccgccaagatccggctcagccccgatcgagaaatctcaggatacgggccggcagcgaaggacaacgcctggcagcgatactggcgatcccggcagacaggccggaaaaatcgagcaaccattctagcccacgtgtccgcgcaaagtaccaccagagcccgcctgcaggccgctttttgggtggattattccagttaaacagcttttaccattgcgtatgcaatacaggtgcagacgcatgcccgtgcatgcatccgcacgcatcgcctggccgggaccgcgcggccggccccggcgaccctactttgcgtccttctcgacctcgagcgtcacccggcgcggacggccgctctcggccgggaagtcggtaaaggcgctgcggatcaggtagggcatgaccgcaggcaggctgccgttctcggtctggttctgcgcggtgacctggtagacccgcttgccgctggccgcatccctgaaatacacccgcaggctggagaacgtcaccgaaatgtcgcgcaccacggtctgcggcggccagtagcccgggccccatgggccccacggaccccagggcccgtacgggcggtagtagccaggcccccagtacgggccccacgggccgtaccacgggtccgggtagacggtctcggccacgcgcacgatgccgggcgcggcatcgaaatccatgctgacgcgatagcgcgcctgtttcgccggcacctgctcgaagccgatccccgccagcgccgtggccagccactgctcataggtctggcggtccagctgcgccgcctgctcggcgctgcgctcgaagctgtaggtgcgcggcgcatcgttctgccagccgggctggcggaacgccgtgacatcggtcaccacggtgctggcgcaccccgacagcagcagcgccgccagcaacgccatcgccccccaacacccgcgcggccccggccacgcgcctgccgctcctgcattgccgacaccgcctgcgcgctgccacatagtgctacctcgctttcctctgaatacccacgtgtctctgagaccacgccgccggcgcggaattccccgcagcatgccgatgccgtgccgcgccgggccgcgccccgaccccttggctacaatgaggacttcagcgccatgcttcgctgccgcgcgcatggcccgccccctttcctaacggtcttccgaagacaggatctttccatgctgcgcaccgacacgcccgttaccgtctatcgcaaagactataccccgccgccgttcgccatcgaccacgccgaactggtgctggacctcgatccccagcgcaccttggtcaccagcacgctgcgcttcgcgcgccaggccggcgcgcccgacgcaccgctggtgctggccggcgaggaactcgaactgatcggcgtcagcctggacggcaagccggtcgccgacgcgacccaggatgccggcacgctgaccatccccggcctgccggcgcagggcacgctggagatcaccaccgcttgccagcccgcggccaataccacgctgtcgggcctgtatgtgtccaacggcaacttcttcacccagtgcgaagccgagggcttccgccgcatcacctacttcctggaccgccccgacgtgatggcgacctaccgcgtcacgctgcgcgccgaccgcgccgcctatccggtgctgctgtccaacggcaacctggtgggccagcgcgaactgcccgacggccgccatgaagccgtatgggaagacccgttccgcaagccggcctacctgttcgcgctggtcgcgggcaagctcgaatgcatcgaggaacggatccagtccgcctccggcaaggacaagctgctgcaggtctgggtcgaggcgcgcgacctcgacaagacccgccacgccatggattcgctgatccattcgatccgctgggacgagcgccgcttcgggctggaactggacctggaccgcttcatgatcgtcgccgtgggcgacttcaacatgggcgcgatggagaacaagggcctgaacatcttcaacaccaagtacgtgctggccaacgcgcagaccgccaccgacaccgacttcgccaatatcgaggcggtggtcggccacgagtacttccacaactggaccggcaaccgcgtgacctgccgcgactggttccagctttcgctcaaggaaggcctgacggtgttccgcgaccaggagttctcggccgacatgatgggctcggaatccggccgcgcggtcaagcgcatcgaggacgtgcgcgtgctgcgccaggtgcagttccccgaggacgccggcccgatggcgcacccggtgcgccccgacagctacgaagagatcaacaacttctacacggtcaccgtgtatgagaaaggcgccgaagtcgtgcgcatgtaccagaccctgctcggccgcgagggcttccgcaagggcatggacctgtacttccagcgccatgacggccaggctgtcacctgcgacgacttccgcgcggccatggccgatgccaacggccgcgacctgacgcagttcggcctgtggtacagccaggccggcaccccggtggtgacggcgcgcacggactggaacggcgacgacggcagcctgaccctgacgctgtcgcagcgctgccccaaggtcggcatcgagacccgcgccggcacgcccgagaagcagcccttccatatcccgttcgcgctcggactgcttggcgcagacggcaaggacctgccgctgcagctcgaaggcgaaagcacgcccggggcgaccacgcgcgtgctcgacttcacgcaggccgagcagagcttccgcttcatcaacctgccgcgcggcgccagtgccccgctgccctcgctgctgcgcaacttctcggcgccggtgatcgtcgatgccgagtacaccgacgcgcagctgaccttccagctgtcgcacgacagcgatgccttcaaccgctgggaagccggccagcgcctggccacgcgcgcgctgctgcagctggtggccgaggtccaggccgggcgcgagctcaagctcgatcccgcgctggtgcaggccatgcgcgccgtgctcaccgacgacacgctcaaccccgccttccgcgaacaggcgctggtgctgcccgccgaggcctacctggccgagcgcatgggcgtggccgatcccgccgccatccaccgcgcccgccagttcatgcgcgaaggcctggcgcgcgcgctgcaggccgactggctcgccgcctacgagggcaacgccacgccgggcgcctactcgcccgatgccacctccgccgccaggcgcgcactgcgcaacctggcgctcggctacctggccgacggcggcgatgccgcaatgcaggcgctggccgagcagcagtaccagaacgccgacaacatgaccgaccgcttcgccgcgctgtcggcgctggtcaacagcttcgcccccggccgcgagcacgcgctggcggacttctacgagcgcttcgaggacgacccgctggtgatcgacaaatggttctcgctgcaaggcatgcagcgcggtgacgtcggcccgcacgccggcaagcgcaccatcgacaccgtgctcgcgctgatggagcaccccgccttcaacctgcgcaaccccaaccgcgcgcgttcgctgatcttcagcttctgctccggcaacccggcccagttccacgcccaggacggctcgggctaccgcttctgggccgaccaggtgctggcgctcgacgccatcaacccgcaagtggcggcgcgcctggcgcgggtgatggaccgctggcagaagtacgaactggcgctgcgcgaccgcatgcgcgccgaactggaacgcgtcgccgccagcagcacgctgtcgcgcgacgtgcgcgagatcgtgggcaaggcgctggccgcctgagcggcgggaacgacacaaggaggcccgccaacgcccccctttgcccggccaagcgcggccgggcatgtagaattgcggccatccaaggagaaccaaccatgactcgcatcagcctcacccgctacctggtcgaggagcagcgcaagcacaacacgatccagcccgaactgcggctgctgatcgaagtggtcgcgcgcgcctgcaaggccatttccaacgctgtcagcaagggcgccctcgccggcgtgctgggctcggccggcaccggcaatgtccagggcgaaacccagcagaagctggacgtgatcgccaatgaagtgctgctcgacgccaacgaatggggcggccacctcgccgcgatggcgtcggaagaaatggaatcgttctacgagattcccaaccgctacccgaagggcgaatacctgctgatgttcgacccgctggacggctcgtcgaacattgacgtcaacgtctcgatcggcaccatcttctcggtgctgcacatgcccaagccgggccagaccgtgaccgaggccgacttcatgcagcccggcacccaccaggtcgccgccggctacgctgtctacggcccgcagaccaccctggtgctgaccgtcggcaacggcgtgcacatgttcacgctcgaccgcgaggcaggcagcttcgtgctgacgcactccaatgtgacgatcccggacgacaccaaggaattcgccatcaacatgtcgaacatgcgccactgggccccgcccgtgcgccgctatatcgacgaatgcctggccggcgaagaaggcccgcgcggcaagaacttcaacatgcgctgggtcgcctcgatggtcgccgacgtgcaccgcatcctgacccgcggcggcgtcttcatgtacccgtgggacaagcgcgagccggaaaaacccggcaagctgcgcctgatgtacgaagccaacccgatggccatgctggttgaacaggccggcggcgccgccaccaacggccaccagcgcatcatggacgtgcagcccgaaaaactgcaccagcgcgtctccgtgatcctgggctccaagaacgaagtggaacgcgtcacccgctaccacctggaagccgaagacaaggcctgattccggccgagcggcaacaggacggggcgcccaggtggcgccccgttttcttttggccccggccggatggcacgggcgacacaaaaggggttcacaaggcggaaaaacgctgctactattgcgggctgttccagttcaccggaacatgttgccgaagtagctcagtcggtagagcagctcattcgtaatgagaaggtcgggggttcgattcctctcttcggcaccacagaattccagggcatcgcccacacaagcaaacccggacagcatcacgctctccgggttttttgttgcctgtgatcgggcaaagtcggcggtggcagcgggcgccccagccgatgcgcccaccagtaacggaaaggatggtcgaaatcgggataaagcaccggctggctgaagcagccggcacgcttcatcaggaggtaggcagcaagcatggccgcccaaaaaactagcagttccacgataacggccacccttggatttacaggtggctgttttcattataggtagccgcctaccccagggggacgatggcgcacccgtgcaaaccctaggggctgttccctcaatacacatccggaacgatcatctccttcggcaccggttgccgcacatagtcctcatgccgttcgcgccccggcagcaccacgctgggcgcctccacttccgcatagggcacctggctcagcaggtgatggatgcagttcagccgtgcgcgcttcttgtcgtcggcctgcaccacccaccacggcgcctcggcaatatgcgtgcgctcgagcatgatttccttggccttggtgtagtcctcccagcggcgctgcgattccaggtccatcgggctcagcttccactgcttgagcggatcgtggatgcggctgaggaagcgcaggcgctgttcgtcgtgcgtgatcgagaaccagtacttgaacacctggatgccggagcgcaccagcatcctttcgaactcgggcactgagcggaagaactcctcgtactggtcgtcggagcagaagcccatcacgcgctcgacgccggcgcggttgtaccagctgcggtcgaacagcacgatctcgccggcggcgggcaagtgtgccacgtagcgctggaagtaccactgggtgcgttcgcggtcgttgggcgctggcagcgccgccacgcggcagacgcgcgggttcaggcgctgcgtgatgcgcttgatcacgccgcccttgccggcggcgtcgcgtccttcgaagatgatgacgatcttgtgtccggtggctgccacccagctctgcagccgcaccagttcgccctgcaggcggaacagctcgcggaaatagtggcggcggctgtcctgctcggcctcgtcgtccaggtgcaccggatcgccgaaggcctcgctggcttcgcggtcgtccagttccagttcgatctcttcgtcgtagtagtcggccacctcgttgtggatgcgccgcaccaactctgcttcgcccggtctcatctgatctgctctccctgtggatacaacgcggtcgcgccgatactcgcatgccggtattgcagccgcgtgaaagcggggcaggccacccgccctgccccgccttcctgcctgtccctgcagattacgccagttacgccgccggattgatgttgtggttgtggcggaacaggttgcccgggtcatagcgccgcttcacctcgaccagccggtcgtagttgggcccgtaggccgcgccgatgcggtcggtttcttcctgcgtcaggaagttcacatagacgctgcccagcgcgaagggcgctgccgcgcggaacacttcacgggcccagctgatgcacttgtcgtcgtcagcgggcgcgtcccagcgcccgtgcaggttcatgatgaagttggcatcgcggctggcataggcggtcgcatcgggcgcgacgcggttggtctgcccgcccatggcgccgataaagacctcgcattgcggcgagggcagcttgccgatctgttcgatcagcatcgtgatcaggccgtcgtccagcccggcgaagttgtgcgatttccagtagttgcgagcgcccggtgtcagcaacggatcgaaggcctgctgccatgccgtgagcggcatcgggccgagatgctcgccatagggcgtgccgagcttgcgcaacggctcgaccagttcggggcctttgtcaggcgggccgatatagcagatcgccagtgccgcgaccggcttgccgtgcgtctcgggcggcaggaacggcagcggcggcgcctggcgcagcaccacccagacggtcagctcgtcaggcatcgacttgaacagttcacggtaggccggcaacaccgcggcggcctgttccagcggatagacgatcagcccgccatagatctcggggccgaccgggtgcagccggaactcgaacatcgtcaccacgccgaagttgccgccgccgccgcgcagcgcccagaacaggtcggcgttctcgtcggcgctggcgcgcaccagcttgccgtcggcggtcacgacctgtgccgataccaggttgtcgacggtggtaccgaacttgcggctgagccagccgaagccgccgccgagcgtcagcccggccacgccggtggtggagttgatgcccagtggcgtggcgaggccgaaggcctgcgcctcatggtcgaaatcgcgcagcgtggcgccgggctccacatagccgcgttgcgcgtggggatcgatgcgcacggatttcatctgcgacagatccagcaccatgccgtcctcgcagatcgccagcccgccgatattgtggccgccgccgcgtatcgacagcagcacgccatggtcgcgcgcgaagttgaccgcggcgatcacgtcggcagcgcccgcggcctgcacgatcagtggcggacggcggtcgatcatcgcgttccagatgcggcgcgcttcgtcgtagccgctgtcgtccggctgcagcaggcgcccgcgcaactgcgccttgagtgcctcaatgtgttcctgcgatggctgggccatagtgtgcctcccgatgctggttggaaacatcggacggcgcgcggcgtctgggtgcagggaaatggccacgaggaccgatgactagatcatttaaggcagtcaccgcttgaatgtaaatggggctctggccccacgcgcacaatccccatggcaagtgccgcaacgcgttcatgccgccccgccaccctgccggcctatcatgaatgaacagccgggacggcgccctcgcgccgtccgtccgcaccatgaacacagccagccaccctcccctgttcctgtgcggcgacgtgatgaccgggcgcggcatcgaccagatcctcgcgcatccgagccagccgctgctgcatgaatcgtatgtacattcagcgctcgactacgtgcgcctggccgagcataaggccggcccgatcgcacgccccgccgcgccggaatacccctggggcgatgccctggcggagctggaaagccgcgctgcgcggccgcgcatcgtcaacctggaaaccgccatcaccaccagcgacgatgtctggcccggcaaggcggtgcactatcgcatgcatccgggcaatgtcgcctgcctgcaggccgccggcatcgactgcgcggtgctggccaacaaccatgtgatggactggggacgcgcgggcctgacggatacgctggcagcgctggacggcgcgcatatcgcgcatgccggcgccggccccgacgaggcaagcgcggcgcacgccgcactgctgccgcggcccggcggcggccgcgtgctggtgctggcccttgccatggaaaatgccggcacccccgcggcctggcgcgccagcgccggacattccggcgtgaacctgctggaagactggtcggtggcatcgcgcgaacgcattgccgcgcaggtgcgcaagttcaggcgtgccggcgacatcgtggtggtatcgatccactggggcccgaactggggctaccacatcgaccccgcgcaacgctccttcgcccgcgcgctggtagagggcggcgaaatcgacatcgtgcacgggcattcctcgcatcatccgctcgggattgagctgcatgccggcaagccgatcctgtacggctgcggcgatttcatcaacgactacgaaggcatcggtggctacgacgaatatcggccggacctggcgctgatggcctttgtcagcttcgatgccggcggcagcgccgacctgcggctggtgccgttgcggcgcagccatttccgtctggcctacgcgcgcgaagtggatatggcgtggctgcaggccatgtttgaagacgagggacgggcactcggcacccgggtggagcgcagcggcttgcatgaactgcgtttgcgggcggcataaaccccagcccatgaaaaagcccgccgttgcggcgggctgcacgaaagccaatcgccaggcgtcagtggcgatggatcatgtgatcaaaccatgtgcgcactgactgctcctgctgctgcagcagcgtcgggttcttttcccgcaacatccagatggcaaatgcggcgcacgcaacgagggcgatcaggaccagcgcggtaatcaaggtcgcggccatagcaacctcctttgggtaatggttgcaccttcagtgtagttcgcctggcagccgtcacggaaagcagaaaggccagccttgctggctggccttccggttattccagtgccacgtgagttggttccgtgtaacgcttccgcagagtgctgatccgcttcttcattcactgcccgactctagctctctcgcccatcctgcggcaccccaggacataactgcagcatagtacaaatccccgcggataacagcgcgcgttcagttgacggcgatgcggtcgtcgaccaggcggatctggccgccaggcttgtcttccatcactttgagcacgcggctgcctacctgcagcgtgacgccgccatggatgcggcgcgcggcgtcgatcacggcctcggcggccggctgcatctgctgccccagttcggtcaagcgtgcctccagctcgaacaggtcacgcgacagcttgaacagtgtcgcgcgcgccttctcgcgcaggtcgccaacggccttctcgggatgcttggcaaagaaatccaccagctgtttgaccttgttctgctctgccagcatgccgcggcgctcggcttccagcgcggcgcgctgtgcgtcggcaaatggattcaggccgacctggatgctggtggcggtgccggccggtgcgcccagcaccgcggcgcgcaccgccagcaaggcacggctgcggccgccgctgatgctgccctgcgcgccggtgccgcccaccacgatgcgctcgccggcagcaacatcgctctgccggatgccgctttcgacgttgacctcggtgccggcctcgaccacggcgttttcgataaagcgcgccttcaccgcgcccttgcagcgcacgctggcgcggctgatgccgccttcggtgcggccggtgtcggccttgccgatgatgccgcccttgacgatgacattgccgccggcctcgacattggcggcttcgatggtgccctcgaccaccacgtcgccgctgacgttgaccgacatgccggtgcggatgtcgcccgacacgcgcagcgtgccgtcgaacgccacgttgcctgagtgcaggtcgaccgattccacctgcaccacggggctgaccgagatgccgtgcacgcccaccaccggcgatcctgcgatcaccgcgcgcagcagctccgcatcgtcggcatcggcggcagcgccggtcaggccttcggcaaaaggcgggtcatcgaccggatcggcggcgacgggcttgccaaatacgtcgacgccgtcattgccgcgcaccgccggaacgcgccgcatcagcggcgtgccggggctgaccagcagcaggttgcccaggtcgcgcaggtcgaccttgccggcctcgtcgtcaggctgcgccggcttgcgcggttcgagcaggttgatgaagcgcgccggctcaccctggcgcggcgcgacgccggcggcaatggtgcgcagctcgcaacggccttcggccagcgcggcgtccagtgccagggtctggatcggcgccaccacgccgcgcgccgccgcggcgcagcggatgtcctccgcgccgaccggacggccgccttcggctggcagcagcgtcagccgcacggccaggccgtcggcggtgatgtcgagctcgaacgcgccgtcgatcagcgcaccgatggtggcatcgatctcatgctcggcgcgctggcattgcgccaggaactgcgccaccgcgcgcgcatccagccgcgccccggcccagcccaggctgtccaggcattggcgcaggctggcctggtccggcggcagcctgcctggctgcggcgtgtagcgcgcatgcacctgctcgcctggctcggcaagctccaggcgcaaacccgactcatgcgtcatgcgtcccctgaatcgtcttgtgcagccgcgcggcgggtgccggcgctccgcttgttatcgatccataaaccaacggcagcagcgcggagaactttagcgcacaccttgccgcgtcggccgggctgccatcgccttcgtggagaagcctgggggacgatccggacgatgtccgggctatttgaccgagaccacctcgatggtgccggtctggccgttctgcacgacctcctgcttcatgaccaggcccatgtcggggcagtaccagtccgtaacgctggcgctcgccggcggcaccgacacggtgtggcccgccaccgtgaccggcgccatggtcgtgctgcgctcgtagcggaccggccagcaggatttctggccgaggcgggtggggatggtcgcgcgcttgccgacgaccttgccgccgatggtgaccttggcggacgggatcctggcctggccggcgctctggccggcggcggtcatctgcaggtccatgcgcaccgtctgcgattcgcccggcagccgctgtccttccgcttcaatgacgccgccataggccagggtcccgaccgcgctgctgtcgagcatgcccgatgccgtgccggcggcgctcttgccctcgaccttgcccggcgcgccgccgcgcgagatggacaggcggtcttcgatcaccgccatggtgtagtccagccgcgtctcgttgcccgagccggccgcggccacattcgacacgacgctgatattggcattgcactggcccttgcccgacttgcgcacgccggacacggacatggtcgccgtgcccggcgcaccgccctgcatggtcatgcggatctcgccgccgtcatgcatccacggcgcatcgcaaacgccggccgctgcggctgccggcagcagcagcgcagcgaaggccacgcttgcgccaagcgccgtgcggcggtccagggattgccgcgcgctagcgcggtcggaattcttcggcatctgtcgcctctccattggtcagttcagcaaagcaccggcagtcagtccttgcattgcggcatgtcgcggaagctgtcgcgcaccgtcgcacaggactgcgccaggccatccttgtcggagacgccggcccagcgcgtgcggatcgattccagctcgccgggcagcccgtcgcgcagggtctgggcggccgcggcctgccccgacttgtcgagcttggccgccatgttctcggtgcaggcgcgctgcgcggcctcggcttcctggcaggccttcggcaaggcatcgctggccgctacggaatgcccttcttccttgccacagccggcaacggccagcgccagcatgaccggcaggcaggcacgcggaatccagtacgacatcatgacttctcctctttcttcaccgcggaggcggggggttctgatacgagacaatggcaaggccgccgtgctgcgccggcgacgccggctggcgcaagggcgccgcggcgctgccgtcctggccgccgcgcaagcgcgcatagcggcccagcacctgcggcacgtaggcctgggtctcggcaaacggagggatgcgcgacccgtggcgcagcaccgcgccttcgcccgcgttgtaggcggccagggccaggctggtgtcgccgttgaagcgcgacagcaggccgcccaggtaggacgcaccggcctgcaggttctgggccgggtcataggcatcggtcacgcccagcatgcgagccgtggccggcatcagctgcgtcaggccgatggcgcccttgtcggaggtggcttgcgggttccagcccgactccacctccaccatggccatcagcagatgcgggtccaccgccgcggcctgcgccgcgcggtgcgcgagggcaaccagctcagagggtggggacttggcgctgacgaccgcggcctttgccgccgccagcgttggcagcccgataaacgcccgcgctggcaatgccgcgggcgccgcggtggacgccagccgtgccggcgctgcgctgcgcgacgtgaggaaggtcacgccgctgccgcggtcggcatgcatcacgatctcggcgccggccggcaccgcgcccgccagcagcattgccgccaccacaccgcgcgccggcgcggccacgagcgcaggcatcactgcttggccagctccacgcggcggttctgcgcgcggccgaacggcgtgtcgttggacatcagcggatgggtggcgccatagcccttggcatcgagccggtcggcgggcacgccggcgctttccagatagcgcctgacggcggcggcgcggcgctcggacagcggctggttgcgcgcgtcgccgccggtgctgtcggtatgcccctcgacgcgcaggcgccagtcggggtgcgccagcaccgccttggcggcacggtccagcagcggccgggccgccgcgctcagcacgtcggaatcggtttcgaagttgacgccgtagagctgcacgcggcccgcgccttccagcgcctggccgatgggatcgggggcggcctcggccttcgggaagcacggcggcgccttgtccgccaggcgccagccgccggcctcgcgcacgctgtcgaaggtgcgggcatcgcccttcaccagcgctgcgtaggcatggctgccgtcggggctgaaggccatggcgcccttctcaggcgtgccctcggtggtgcgccggaaggccagcagggcaccgttttccagcccgccggaaatcgttcccagcacctgcgtgatcttcatctgcttgttgctgtagtcgccttccacgtaacagccttccaccgcggcaccatcctggtgcagcagcacgtagccggacgaaccgaattccaccggaaactggtagatgccgcccacctggcgcaccttgtcggccgcggcctcgggcttgccgtaggccatgaactgctgcaggccgatctggccctcgtcctggtcgcccggccagcggttgccggtaagcgtcaggcgcagggccccggccttgacgggctgggccagcggcacgcgggtatcgtagccgtcctgccccggcaggtccgcatcgtagatcacggtccaggggccttgcgtgccgccggccgaggcttcgacgcgggcatggcgcgcattgctgcgcgccccggcatcggacaggccgcggaagcgcagcacgtcgacggacgaggcctgcgccagcgcaatcaccagctcctgccggctgccgttgcgcataaagccggcatggtccggaatctcattgagcagcggataccacgagcggtcttccttgtcgcggttgaccacgaacgcgcccgaccacagcccggcaacgttggtttgcgcgggcgttgccggcgccgatgccacgggctgcgccgatgccgctgcaggcgcgggctgcgcatcgccttgcgcagcggcgctgtcagcaggcttcttcttgcagcccgccaaggccagcagggccacgacgcccaggccaatggcggccttgcgggtcgtcagtccaaacgtcattcccttcaaggtacttccccttcttctttttgtgatgccggcctgtccggtacgcgcctcaatgcggggcgcgcatcagcatgtcgatcttctgcagccgcacgcggacttcgcgctccagcggcgccagtgtttccgggccggctccggccttgctggcgcgcgcgtagttcgcgatcgcctcgttcatgccgcgctgctcttcggccagcgcacgcttgaccagctcgcgctcatcgctggccgccacgctcggaatcgccgcctgcgcggcccccgcgacggcggcctgcgccaggtcgggcgcgttgccgcgtgcggacggtgccgctgcctggggcgcggaagccgccggagcccgcgctgccgacgccggcacggcgccgctcaccgccggcggcgcacgccgcgtggtgatgatctgcacgccttcggagcgagaaacctccatcgccgccagcgccggttgcggcacgaacccgaggttacacaacaacagcaacgccaaacaaccccgcttcggcaattttgtcgaccttgtcgattctggcatcggtgtcttcgggcttatcccggcaaattttcacaaatacttacaaaaacggcgactgcggatgcgtcagttgccgcgatacggcgattgcatccgcacgatcgcctcggactcgagcgggatgcgccattccgacgccagcgtggcccgtccggtgcagaaattgggcgtggtcgggacctccatgccgcggtacgaaccggtcgcaacaaaattccggatgccgttgaccagcgagtagatggtgcggtcggcaaacggcacgaacatttcgtagcagtacgtgacccggatcttcagcaggttggcgtcctggatattgacgccagaggacggccccgcgctggtggcgcggtacatcaggctgtcgttggggatctcccgcgtggtcttgccggcgtagtagccgcttcgcccgaaatcctgcagcgccgccggcgtcgggttcagcacgtcgatcctggcctgggtgcgggcctcgaactgggccttggcatagccggtggcatgcgcggtacggtcggcggagcgcacgaacagcggcgtcagccccagcgccagccccttgcgcatgctggccagccggccgtggtcgacggcgccttcgcgcgcggcctgcaaggcggcgtggtctagcgtggccttggcctggtacagcagcccgaactggatcacgcccaggcacagcagcagcagcgccggcgcgatgatcaggaattccaccgcggactgtccccgtgccccgcgccgcgccgcgtgcttttgctggtgcgtcatggcccctcctcccgcagttccaggttctggcccggcgcaatccccaatgccgccgcgcgccccgcgccgagctcaagcgtctggcgcgcgcgccagtgggcacgcacgcgcaggcgtcccacgcacgggtgcaccgccagcacgcgctgccgcttgtcgagaaacaccacgtcgatcgccatgcgcatgccaaaggtgtggactgcgccgcagggggacagcggcaaggcttcgtccggtgccatcgaatcgcggctgagcagccccgtcatgcgttcgcgcgcagtggccgccaccgacacgcgcacgccggtgtcgagcgtgctgtggccggcccgcaggtagaggcgcgcctgcctcacagcagcccttcctgcataaacttcatcacgatcgggaagccaagcacgataaaggtgaccgggaagataaacaccaccagcggaaagatcagcttgaccggcgcttccatggcctgcttctccgcgcgctggaagcgctcggtgcgccgctgctccgactggaagcgcagcgtggcggccagccccgagcccatgcgctccgcctggatcacggcaccgacgaaattggtgacctccttcacgcgcaggcggtcatccatgcggcgcagcgcatcggcgcggctcaggcccgacttcaggtcgcgcagcacgtgctcgaactcgcgccgcagcgggccctcaggccccttctccaccgcctgcagcagggcgccgttgatgttcaggccggcctctacgctcagtgtcaggaaatccagaaacaccggcaggtggcgcgtgacctgcagcaggttgcgcttgcgcacgtcgcgtagccagatgcgcggatagaagaagcccagcgcgctggcggcaagcagcagcagcggcgagaacacgcccagccccagcatggctatgcccgccagcaggcagaacgccagcgccgaaacgatcgacagcgacaggaactggcgcgccgtcatcaggaacgacatgcccgtcaggcgcagttgctcgtccaccgcggcgcgcagcgacttcggcgtgatccagacgagatggtggtcgaagaagcgcaccaccggccagaccgcgcgcagcgacggcggcaacgggtcgaggtagtcgcgcgcctcgtcgggaacggccacggtgaggcggcgcatggccatggtggtggcggcgagcacgccgaccaggccggcggcaagggcgaaggcaacaacaagcatcatggtcggccccggtcagacatcgatatgggtgatcttgctgatcgccttgtagccaagcagctccatcaccgcgatcacggacagcgtgccccagccgatcggcgaactgaacagcggtgccatcgccaccggctccatgtggttcagcaccacgatcaggaacagcggcaagcccgtcatcaccaggccctgcatcttgccctgcgcggtcagcgcgcggatcttgccttccatctgatgcttctcgcgcagcgtgcgcgccaccgactccagcgtctcggccaggttgccgcccacctcgcgcgagatcgtgatggccgcggtcaccatcaggaagtcgggcactggaatgcgtttttccatattgcgcagcgcgtccatcaggtccacgccaagccggacttcgcgcatcagcaggtcgaactcctgcgagatcggcgggcgcgactccgccaccacgctttccagcgccatcgggaagctggcgccggcgcgcagcgcgctcgacatcatcagcagcgcgtcgggcatctggtcttcgatggccatcaggcgcttgcgctgcatcttcttcaccagcgcgcgcggcagcagcaggctcaccggaatgctgagcatcgcgaagaacacgttctgcgataccagccaggtcagcagcggcagcgcgaacaccgccaccaccgagatgccggccacctgccgcatattgatgaagataaagagatcggccagcgaggcctcgacctcggtcgccagcgtctgcgtatgccgcacgaaccagcgcttgccctgcgacagcacggcccacgcaatcagcacggtcatcaggaaggcgccgcacagcaccagggcaaggttcatattgcctccttactcgtcgcgggcggtgaagatgcccgtattgacctggatgccgcgccggatcaggtcctggtagaaatccgggatatacgaggtcgcgacatagcgccccttgaccttgccgtcggcaccgtagccttcctcgcggaacatgaacacgtcctgcagctgcaccacgcccgtttccatgccgctgacctcggtgatatgcgtcacgcgccgcgaaccgcaggagaagcgcgtctgctgcacgatcacgtcgaccgccgagcagacctgttcgcgaatggcctgcaccggcaggtccagccccgccatcagcgtcatcacctcaagacgcgacaggcagtcccgcggcgagttggcgtgggccgtggtcagcgagccgtcatggccggtattcatggcctgcagcatgtccagcgcttccccgccccggcattcgccgacgacgatgcggtccgggcgcatgcgcaggcagttcttgaccaggtcgcggatcgtcaccgcgcccttgccttccatattgggcggccgcgcctccagcgacaccaggttgggctgcgacagctgcagctcggccgcatcctcgaccgtgacgatgcgttcgtcatccgggatgaagctggacagcacgttcagcagcgtggtcttgcctgagcccgtgccgccggagatcacgatattggcgcgccgctccacggcggtgcgcaggaactccagcatctcgggcgacagcgagccgaagccgaccaggtcttcgcccctgagcttcttgcgcgagaacttccggatggtgatgttcggccccttgagggcgagcggcgggatcaccgcgttcacgcgcgagccatcgggcaggcgcgcatcgaccatcggcgagctttcatcgatgcgccgtcccagcggcgcgacgatgcgctcgatggcgcccaacacggcgcggtcgtcggtaaagatcaccggcgaacgcgtcagcctgccggcgcgctcgacaaagatctcgtcatggcagttgaccatgatttccgagaccgcgtcatcgtccagcagctcttcgagcggacccagcccgatcacttcgtcaaagacgctctgcttgagcgcgtccagcgggatctcctggctgcggaacacgctctccttgaggatgtcgtcgagcagcgagccgaccagttcgcatagctcgtcctcggccatgcgcgcgacgttgacgcggcgcaggtcgagcgcagcgatcaggcgctggtgcgcctgcttgcgcagttccacgccgcgcggcgagttgatgggtgcgcgcaaggcctcgttcgagcggcgccaccggcgcaggtttggcggccaccggcgctggcttcggcgcaggtgccggcggcctgggtgcgggcaccgcttcgcgcggcaccggcacgcttgcctggggcgatggcgacagggtcaccgcctcccgcggcggcgacggaggcggcacaggcatgggcaccggcaccaccggttgaggcgccgcggcatcctgtggtggttgggcgtggtgctgctgcggcgatggctgcgccgccacgcccgctcccgctcgccccggctcggccacgacggacagcacgaagccgccgatctcgatctggtcggccgccgccagcgggccatagcgcgtgaccgggtcgccattgatcagcgtcgaggcaatgccgccctgatcctcgatataccagccgccgttgtgtccttcgatgcgggcgtggaccttgccgatcagcaggcccttgaggacgatgtcgcagccgggatccttgccgatggtacagcccggccccttcacatggatcacctcggcgctgccattgcgctgctgcaggcggatattgagcatggccggatcagcctccgttcatcggatcgacgccgggcgggggcagcggcggccgcttctgctccatcacttcctgctcacgcacggcattcgcagcgggcagcgggcttggctcgccgaagcggtggcggtagttggcatcgacatccgcgccacgctgcagcagcgcggcgttctccgggctggccgggtcatagacgaccggggtgacaaagatcaccaggtcgctcttgttgttgcggaattcgtcggaacggaacaatcgcccgaggatagggatgctgcccagcagcggcaccttgtcgacggccttggatgcgtcggcattgaccagccccgagatcgccagcgtttcgcccgcgcggatcgaggtctcggaggtggtgcggcgcgtcaggaaggccgggaagccgccgaacgataccgacgggtcgatctggctgatctcggtttccagcgtggtcgagatgacattgtcgacgttcaccgccgggcggatgttgagcttgatgccgtacggcttgtagtcgacgtcggtggtgccgaacgcgccggccttgggaatcggcacttcgccgccggccaggaaggtggccagcccgccgctcttgctgttgagctccggcgcggcgagcacgtaggcatcgccatcggaaatggccaggttgatgcgcgagaagatggtcgtggcaatgccgagatagaagccgctggcggcgccggccacctggctcggggtatcggtgaaggtggccgcatcggtggacggcagcgtgcgatagcgcccggtgtgcaccggattgcccgcgaacgcgatctgcgggccgttgaagctctgctgccaggcaatgccaagcttctccatgccgcgccgggtgatctccatgatgtgcaccttgaagtgcacggtcttcttcagcgcatcgccctcgtcggcgcgcaccaggttgaccacgctgtccaggcccgaggtggcggtcttgatcagcggcaccatctgcggatcgacgatgcccgacagcaccacgctgggaccgaccacctcgatcttcaggccgcgcacgctgcccagcgacgcccgcaggcgctgggccacgtcggcggtatcggccggcgccacgcgcagcttgccctgcagcgccacgccgcgctcgttccagacgatcaggctggtggtgccgatctcctctgccagcagcagcaggcggccgtcgaccacggtgctgctgaccagcgcgccattgccgatggccacgcgcctgatggtgcccggcacctcgagcgcgcgcacctcgcccttgaacagctcgatcgcaccaaagcgcgccggcagctcgtacgacggcggctgcgcgcctgtgcgggccgcggtggtcacgggctcggcggcccaggctcccgaggccaacgctgctgccgccagtgctgccatacccccgcgcaccgcatggcgcgcccccttacccgttttcccgtccggtgctccgtgtaccgtgaccgcctgcaggcgcccggcgatgccgccgcgctgcgcgaaagacccatccattgcgtgttccgtcagttggtgttctggataatccgatgtcgtgcaccgccgcgctcaacgcgaggccggccggcccgccatggcgttggcggcgttggcaacggcgccctgctgggcctgggcgatgccgcccgcggaaccgcccatggacccgccattggccagcgccgaagaaatggcgttgccgatgtcctgcgcggtaggcagcttggagatcatgttggcgcccgcggaacggccaccgacgatgtattcgatggccgcttcgtcgccaccggcgaagagcgcgtgctcgctgaccgcgatctgcggggtcgcggtcttgtcggccgcattgcgcagcaccgcgcgcaggctgccgaccttctgcgccagcgccagccgcgccgcctgttcgggcgacaccatcagcgtgaggctgtcgtaatccgggttggtgtccacgccctccgcgccttccgcggcctgcgccgccatggcttcgccatagtcgcgcgggcgcacgtcctggccggtggccagcaccagcatgtccgacatcagcagccgcgcggtctgcttgtcggtgcctgccgcagtgggcgaggtggagctgatcaggaacaggtcgacatggttgccaggcttgagcatcttggccgtcgagttgaccatgtcgacctcgatggtgaaggcgcgcttgccgggcttgagcaggtcggagaaatcgcgcgactgcagcgcttcaacgtcggcacgccgcaccggctggccctgccgcacctggcgcaccaggcgcaggttcgccaccttgtcgaagctgctcgccaggatcatgtcttcgtagaccaggtcggccggaatctcccgtgccgcgaagccattgccgtcgatcaccgtgcccggcgcggcgttgcgcaccggcaccatgacagccacgcggcggccctcgttcagctgcgcggccagctgctctttcagtgccgcttcgcgcccgctcaggaagtggtagatccacagtgtcagcaggccggcgaccagcacggcgatgacgaggacgacccagggattcccgatgattgaatgaatcttgattttcttcagcatgaatgtgcttgcagtagccagacgccgcccgctggcggtgcgtcagggaagtgacagggaaaagctgtatgcctgaaagaaggacctgaacgccgcggccagcatgctgatgaccgagttgtcgccgccggcgaccagcacggcaacgaccagcagcgtgatgacgatgtattcgaacgcggcctgcccgcgctggcgcctgctacggattgccatcgcgctactccggccgcgccacggtgatcaccgcgtcggtctggccggcgcggtcgacaaaggtggcatccatgcgttcctgctgccgctgcatggccagcgtgaggccctcgatgcggcccgaaccgtcggccacgggcgcgggcatctgcaccaccgaactccagccctgcgccgccagccgctcggcggcgcgctgccgcgccgcctgcgcgttgccgggcagccggaccaccagggtgcgcccgcgctggccgcggtccgtgctctggacatccgacaggaccttggcgccgggcggcaggcccaggtcgcccagcccggtgccggacgccaccggcgccagcttgctgaccgagaagatgcccgccacatgcccgcccggcgcgggcctgggctccagcgacagcacatagtggcaaagcccgtcgatcgcgctcagcacgtactggccgccggcccgctgcccgcgcgccggcacgccttcgcgcgtccagtactggcgccacgcgtccgagaccgcttcggcggtgccggcgaactccatcgtcagcacccgcgtgggcaggccgttgaccaccatgtcggtgccgaccgcatgcgccctggcaggcgcaaccggctgccgcgtgcagtccgtcgcggtcgctgccgccgcggaccaggcgagcgcggccggcagcagcgcggccaggcagcgcatcagcacgccatgcatgcaggctttcatctcagcggctccccaggcggtcggcggggaccacgtcgggctggatgcggcccaggtccagtttcaggatttccggcccgaaggcggccagcccgacggtcagcgcggtgtcgatcacgccgcccttgctggtgggcaccgcttccttgatcacggcgagcgtgccgttgcgcccctcgggcgtccaggcgttggtcagcagcacggtgtggtcctgcatgccgaagccggtccagcccggccacagcgcgcgcagggccgcgttgtcgccggcgacggacaaccccacctcggcccggtagaggttgcgcgtggccaggtcgaagccggcactgaccgcgttggccgcacccatggcagccgtgatcggcttgagcgtggctgccggggtttcgtcgacgccgctgcccagggtcacgtcggcatagttgcgcagcatgtcgacgccggcatggtccttccacatcggcgccatgccgccgggcaggcggcgcgcggtgcggtcgctcgacgccagcgcggcctggtcgtgccccagcacgcgctgcacgaattcgctgcggatctcttcgtcgcccttgctggcgaagctgccgtgcgacgcgcgccagcccgggtcgacggtccagaccgtgcgctcccagccggcatagcgcgaggccatcagcgccttgttgcgcacgtcgctgaacttgcccagcatcgccatgccgagaaacagcacgccgagcaccgtcatcgcggcgatcacgaattcgatcattgcctgtccggctgcccggttcggcctggctggcctgcgcatgcgcatgtccgctccctcagttgccctgtgccgcgatcgcggcaacgcgttcgagatcgctggtctgcgtcagcgatgcctgccagtacggattgaagaggctcgggtattcgatgcgcgaatcggcgcgccgccaccccgccgcgctgcgcagcgcacccgccatgccgccgctgtcggtcgggcggataaagtacgcgctgccgctggccagcgcgcgcatcatgccgccggccatgcgcccgtccagcgtcaggcgatctccgcccggcagcacgcgcgaactggtgacgactgaagtgtcctggcgctgcgcctcgatcgtgatcgagggcgcgcggttgaaatcgtccacgggcccggtgccaggcttgggctggttgctcaggtcggcgtactcctgcagccccgcgggcttgttgtgcagggtcttgcccgggcccgacgagtactgcatctgcgcggcgatcagcgtcagcgggttcagcagcgaaccgccgaagttgctgtagccgccatagccggagcggcccgaatagcgcccgcccgggccattggccgcgccgccgcgcccgacactggacaccgtgggaatcgcaaacccgaccgggccggccggcgtggcccagacacaggcaagcgtgccgttggcctgcgaggcatcgagtgcttcccagcccttcttgtcgcggcgcagatgcgtgccgccatcatgcgtgacgacggtcaccatgatggccaccaccgcgcccttgcagcccttgtaggcagtggggaccgccgtcggcgagcgcggcgagccgcggtccttcaaaaagccgtcgagcgtggtgccgtcggtggtgacgtcggcaaagcggtccttgccggtggccgaaccctgcttgggattctgcggatcagtcacggtggtgaacttggtccagcgggccagctgaacgccatagcgcgggccaaagaagtagccggaactgaccgtcgaatccggctggttgcgcttggcgacttcgtcggtcaccagcggtaccgcggcgatggtgcccgcgtggtaggcgcgctgcgccatgctgagcgcggcgatgatgtcatcaagcccggtcaccagcggcggcagcagcgtgttcagggcggatcgcaccggcgtgatcgcggccttgcccagttgcttgggcgtggtccacagcaactgcccgtcggagaagatcttgaccagcgtgtcgatccaggtgttttccgtgtaggtgcccttcagctcgtcgatccacgacttaaggctcacggcctgggccacggccacctggttggccaccatcgcgcggttcgcgtaggcggcaaagttgtagtcgcgcgcctgcagcaccgcggcgctataggccgctgcgtccgccgtgttctgcagcttggtcttggcgctggtcagctggctcgcgttgaaggcgagatacagggccagcccgccgatggcgaggaacaccagcgcgaaggcgagtgcctgaccgcgctggccgggacggctgcgtcgatgcgcaagacctgttttgcccatgttccgggatcgcgagtgctggagcgcagcgagcaactggcggcgatgccgcttagttgttcttgcccgtgtcgttgccgacgttgtagttgttcagccccttgccctggttggccttggagctggcatcgtccgcggcgctgccggcttgcttgatggcctgcttggatgccgagttcttgccggccatttcctgggcgaggcccgcggtctggttgcggatggtctggccgaacatggcatagacgccgatcgcggacacggcgatcagtgccacgatgatgatgtattcggtcatgccctgaccttgctgacgcgccttgcggcgcagatttgcgaatgtcataacgactccttccatgggaatgcacagaaacggttgcgccatatgaaaggcgcctcatatggaagccatatgtaaaggaaaacactgatgcgaacggttatccggcagcagcggcgtgcatgctatcaaaaggttccttagggccgaagaggaataatttcaatatttttaatagcgttgaaataaccctaccagggactcccccgaatgtaacaaaaagtaatccttcacaatgggcggaggttatacgaactattctcggaaccggcacattgccagcaatggggtgctgttgagcgttgatttacggatgacaagccgcgccacgggcggcaggccgcatgcggcctgcctgctggacttcaaggcgaaccggggcagtcataccgcccctgccagctgcccgcggcataaaataaagaagcaaaaaaatggcagaactggatataaagaatgcagtggaaatactgggggcgttagcacaggaaaatcggctcaggatatttttactgctcgccgattccggaccggaaggaataccggcaggtattatctccgcatcttccgatttaactccctcttccgtaacattccatttgaaggaattggtcaggacggggttggttaaaagccgccagcaagggcggttcatgatttactccgccaccaccgacggcatttcctcagtcctcgcatttcttggcgggaaatgcgcttccctgcagtagagggcactgttccggcggcgcgccgcgccgccggacgtcccgccgcgcgggcctgcgccgccagcccggcacctcatcccgacaatcccgtctgccaaatttgcgtatttcgaattcatgacacaaatcgtgtcaattatgttgtttcaggatcattgccgatttcggaattcagccttgatccagatgcgacacgccgccgctggtggccaaggcaggcggtttctgaccatttgccgcgctttcgccggagccgagcggcagacgcccggagaaacgcaggcatcccgtgacggtaacaatgcagcatttttaatacttttaccatttatccgacagcagctcgcaagctcgatcgagcccgccgagagtccgtgccggcgatgcgaaagcgccaaccacaccgcgccccgcaccggtgaggccagcgtcactcggggaccaagcgggacttttcggtaaactgtcggcattccgggacgcgccgcgtcccgcagcctgcgcagtccccctcatgtcaaatacccacgaaatccgccccggccagtccatcgaactgctcaaggaactccatatcctgacgcgcgacggcaagatgaatcaggacagccggcgcaagctcaagcaggtctaccacctgttccagttcatcgaaccgctgctgcaggaggtcaaggccgagcgcggccgcgtcacgctggtggaccacggcgccggcaagtcgtacctgggctttatcctctacgacctgttcttcaaggcgctgcaggacgactcacacatcttcggcatcgaaacccgtgaagaactggtgaagacctcgcaggcgctggctgcgcggctgggctttgctgggatgtcgttcctgaacctgtcggtggcggattcgatcacctcgccgcagctgccgcccaccgtcgacgtcgtcaccgcgctgcatgcgtgcaataccgcgaccgacgacgcgatccgctttgcgctggccaagcaggcccgccatatcgtgctggtgccgtgctgccaggccgaggtggccagcgtgctgcgcaagcacaagggcaagctgctggcgggtaatccgctgacggaaatctggcgccacccgctgcacacgcgcgagttcggcagccaggtgaccaatgtgctgcgctgcctgcagctggaggcgcatggctaccaggtcagcgtgaccgagctggtgggctgggaacactcgatgaaaaacgagctgatcatcgcgcagtacaaggacctgccgcgccgccgcccggccgagcggctggaagaggtgctggaaagactggggctggaagagatgcgcgagcgcttcttcaccgcgccggtgtcggctgcgtaatcagcctttgccgggctcgtcctcgcccgccatccagcgctgccagccctcgtggcccaggcggcgcatggtggcctggttgcgctcgtagatatccgccgcatccgggaacgccgccgccgcgcgggcgatggagtcctcgcgcagcaggtgcaggatcggatacggggcgcggttggtgtagttctcgatatcgtccggctcggtcccggcaaactggtactgcggatggaagctggcgatctgcagcgtgccttccagcccgaggctgccgagcaggcgctcggcaaaatacagcaggtcgttgaagtcgagaaaatcggccacggcatccggcaggatcagcagcgtggtgtcgatctggtcggggtcggcgtctgccagcaggcgcagttcgcgctccaggtcgtccatcacgtccggcgcttcggtgacggtgctgaccgcgtagcgcacctgctccttcacatacacgctcttggcgaacgggcacaggttgagcccgatcacggcgcgctccagccagtggcgggtggcggcgatgacggtgtctgcggagtgagtggcggaggtcatgatggcgatgcgcggcaaagcgtcattctagcgctgccgcaggctctataatccgcggcggaaacaccccgccccctgccgagcctcctgatgccctcttccgccacttcctccccttcccaagccagcgtcgacgttgccgtcatcggcggcggtccggccggcctgatggcggccgaagtgctggcggcgcaaggtgccagcgtggccgtctacgacgcgatgccgtcggtcgggcgcaagtttttgatggccggcaagggcggcatgaacctgacccacgcggagccggagccggccttcctcggccgctatggcgcccgcaccgcacagatcgcgccgatgctggcgggcttcggcccgcaggccctgcgcgactgggtgcacgggcttggcatcgagaccttcgtcggcagttccggccgcgtcttcccgaccgacatgaaggccgcgccgatgctgcgcgcgtggctgcaccgcctgcgcgagtccggcgtgcagttccatatgcgtcaccgctggctgggctgggacgagggcgcgcagcatgcgctgcgctttgccacgccgcacggtgaaatggtcgtgcaggcacgcgcggtggtgctggcgctgggcggtgccagctgggcaaggctgggatcggatggtgcgtgggtgccgcggctggccgagcgcggcgtcgagattgcgccgctgcggcctgccaactgcggcttcgatgtggcgtggagcgaagcgtttgcggcgcgctttgccggcgagccggtcaagccagtagccatcgccctgaccgaccgcgacgggcaagcgcactaccgccagggcgagttcgtcatcagcgcgaccggcatcgaaggcagcctggtctacgcgctgtccgcgccgatccgcgaccgcatcgaggccgatggcggcgccaccatccacctggacctgctgccggcgcatagcgccgaacatgtcagcgcgcaggtaacgcatccgcgcggcgcgcgctcgctgtcgagccacctgcaaagccggctcggcctcaccggcgtcaaggccggactgctgcgcgaatgcctgtcgaaggaagcgatgcacgatgccggcacgctggccgcatcgatcaaggcgctgccgctgcggctgctgcgcccgcggcccatcgacgaagtgatcagcagcgccggtggcgtgcgcttcgaggcgatggatgaagggttgatgctgcgcgcgctgccgggcgtgttctgcgccggcgagatgctggactgggaggcacccaccggcggctacctgctgacggcgtgctttgccagcgggcgcaccgcagcgctcggcgccgcggcttacctgcagcaggcttaggcggccttgccgccgacgatgctgagcgccaccgcctcggccacttcgatgccgtcgatcgccgcggagtagatgccgccggcataacccgcgccttcgcccgccgggtacaggcccttcacattgatgctctggtagtcatcgttgttgcggcggatgcgcagcggcgacgaggtgcgcgtctccaccccggtcagcacggcatcatgcagggcaaagccaggcagcttcttgtcgatctcgggaatgccctcgcggatcgccgcgatcacgtagtcaggcagcgacgtgctcaggtcggtcggcgtcacgccgggcttgtacgagggctcgaccgaacccagcgacgtcgacggccgtcccgcgatgaaatcgcccaccagctggcccggcgcgcagtagttgctgccgcccagctcgaacgcgcgctcttcccacttgcgctggaattcgatgccggcgagcgggccgccgggatagtcctcgggcgtgatgccgaccacgatgccggcattggcgttgcgctcggcgcgcttgtactggctcatgccgttggtcaccactcggcccggctctgacgcagccgccaccaccgtgccgcccgggcacatgcagaagctgtacaccgaccgcccgttgctgcagtgatgcacgaccttgtaatcggccgcgcccagcagcttgttgccggcgaacttgccgaagcggctgcggttgatcagcccctgcggatgctcgatgcggaaacccagcgagaacggcttggcctccatgaacacgccgcgcctgtgcagcatctcgaaggtgtcgcgcgcgctgtggccgaccgccatgatgacgtggtcggcttccaggtattcgccgctggacagcttcaggccgcgcacctggccgttgtcgatgtcgatatcgtcgacgcgcgtctcgaagcggatctcgccgcccagttcgatgatctcggcgcgcatcttctcgaccatgctgaccagccggaaggtaccgatgtgcgggcgcgccttgtacaggatgtcctccggcgcgccggcgcgcacgaactcgttgagcaccttgcggccatagtgcttggggtccttgatctggctgtacagcttgccgtccgagaacgtgcccgcgccgccttccccgaactgcacgttcgattccggattgagcacgcttttgcgccacaggccgaaggtgtccctggtgcgctcgcgcacttccttgccgcgctccaggatgatcgggcggaagcccgactgcgccaggatcaggccggccagcaggccgcacgggcccatgccgatcaccaccgggcgcggatgcgagctgcccgcctgcgcgcgcgcgacgaagtggtacgccatgtcgggcgtcacgctccagttcggcttgccggccatgcgtttgattgccgcggcctcgtcgccgacctcgatatcgatgatgtaggtgagcttgatatccgagcgcttgcgcgcatcgtgggcacggcggaacacggtatagccgatcagggcgtctcccttgacgccgatctgcgcggcgctggtgcgcacggcggcgtccaggtcgctttcggtatggtcgagcgggagtttgacttcacttagacgtagcatggggaacccgagaactgcggccggggggttgggcacaccaatgtgccaggccggccggagcgcaattttataggctttcgggcgcggagtcgggaatctggcgggattcgggctggcgggccgggccggtgcggcgccaggacaacgccagccaggcttgcagccggggcagccagcccggcgggtcagtgatcgacaatgcgccggcgcggcttgccgacagcgtcagccagccgcgcgcgggcacggtccacgtatcgcccgcgcgcaggcgccgccgcggtacgtagcaggtctcggccagccattggggcggcccggccagctccagttcacccgcgccggcatgcagcacggtgcccgccgccacgcgcaggcgcaggcactggccggccagaagcggtaccacggttgatgtgtcgttgagatcgctttgcatggcaggactccggtaacaggcacaggactccagcctatcgacctgatctcagccgcggcaggcacaccgcggaaccgcctggaccggaacagccatgcgaattcagccctgttacgatacagtcgccccgcttctgtatctgtactgatgcggccaaccgcgccacgatggccccaatggaatccgccccgctctaccgccaggttgccggccactaccgccgcgccatcgaatccggaacgctcgccgccggtgaccgcatgccgtcggtgcgcgcgctgatggcgctgcacagtgtgagcctgtccaccgcgctgcaggcatgcaggcagctcgagagcgacggcttgctggaagcgcggccgcgctcgggttatttcgtcgcggcaccgctgcgttcgccgctggcggcgctggccgagccggccgcggccttgcctgatccggcgcagtatgtcggcatccaccagcgcatttccggcttgctggcgcgtggccagcaccagcatgtgcataccaacctgggcggcgcctattgcgcgccgtcactgtatccgaccgaggcgctgcgcagcgccgcgacccgtgcgctgcgccggcatccgatgctgttcggcgaagcggtcgagcccgagggctaccagccgctgcgctccgcgctggcgcgccaggcgttgcgggcgcgcgtgcagctcgcgccggaagaaatcgtcatcaccaacggctgcaccgaggcgctcaacctcgcgctgcgcgcggtggcggggccgggcgacgtgatcgcggtggaatcgccgacctactacggcctgctgcagatcctggaaagcctgggcatgcgcgcgctggagatcccgtgcagcccccagaccggcatctcgctggaggcgctggagctggccgcgcagcactacgacaacatccgtgcggtggcggtggtgcccaacctgcagaacccgctcggctgcatcatgccggacgcgcacaaggcgcggctggtgcagtggtgcgaagcgcgcggcatcgcgctgatcgaggacgactgcttctcggccaccgccgacagcgatgcgccgccggccgcggccaaggcctgggatggcagcggcaacgtgatccactgcgcttcgctgcacaaggtgctggcgcccggcatgcgcctgggctggatcgccgccggcaaatggcaggcgcgcgtggaaatgctcaagttcggcctgtcgcggcccaacgagatgctgtcgcagatggcggccgccgacttcctggcttccggcgcgcacgaccgccacctgcgccggctgcgcacccggctgtgcgcgcagcgcgaatggttcgcgcaggccatcgccgcaagctttcccgccggcacgcggctggggtccccgcgcggcggcatgcacctgtgggtggaactgcccgcccagatatcgtccgaggcggtgttcgaccaggcgctgcaggccggcatccgcgtgatgccgggcgtgatgttctccaacgccggccgcttcgaccactgcctgcgcgtcaactgcggcacgccgcgctcggcgcagatcgagcgggcgctgggcacgctggccgccatcgtgcagcggctggcgggctagccctggcgcctgcctgcaatatccctccccttttgcctgcgcctcgcctatgctaatgcgctggtgcgcaggggcggcccggctggtctccgggggcgaagaccgaccacggggcgccgtgcaccacgggaaaaagaagaaggagaaaagccttgagcagtgcatccgcggcaacgtccgtcggcaagagtgccggcaaccctgccggcaacaacctggacgactatcaaaccctgttccaactggcacctgtctcgctgtggctggaagacttcagcgccgtgcgcgagtattttgcgcaactgcgcaaggaaggtgtcaccgacctgcgcgcccacctgcgcgcggacccgcggcaagcggcgcagtgctcggcgctgatccgcgtgatcgacgtgaaccagcgcacgctggagctgttccgggcagccgatctcgacgacctggtggccaacctcgacacagtcttccgcgacgacatgctcgaccagcatgtcgaggagctcggccagttgtgggacggcggcaatcgcttcgccagccagaccgtcaactacgcgctggatggcgagcggctcgatatccagctggaggccacggtgttgccgggccacgaagatacctgggagcgcgtgctgttgtcgatcagggacatcaccccgcgcatgcgcaccgagcgtgaactgcgccgcagcgagcagtatgcgctgggactgttcgagcattcgccggtgtcgctgtgggtagaggacttcagcgcggtcaaggtgctgctcgatgaagtgcgcggcgccggcatcaccgacttccgcaccttcctcaacgtgcatccggactttgtctcacgctgcatgcaggagatccgagtgctcgacgtcaaccagcagacgctgcagatgttcggcgcggacagcaagcaggccctgctgtcgcggctgggcgatgtgttccgcgacgacatgcgcatccattttgccgagcagctgatcgacctctggcacgagaagctgtggcagcagcgcgaagtcatcaactacgcgctcgatggccgcgccgtggacgtcttcatgcagtggtcggtattccccgggcgggaagcggactgggaccaggtgctggtgtcgctgaccgatatcacggcgcgcaagaaggcagaagcctatgtcgagttcctgggcaagcacgacgtgctgaccaagctctacaaccgcgcctactatgaggacgagctggcgcggctgggccgcaagggcccgtggccggtcagcgtggtggcggtggacctgaacggcctcaaggtggtcaacgaccagttcggccatgccgacggtgacgggctgctgcgccgcaccggcgaggtgttgaagaaggcggtgggcgagcaggcctgcgtggcgcgtatcggcggcgacgagttcatgatcctgctgcccgggcgcgacgagcgcggcgccgccacggtggtcgagcagatcggcaaggtggtggagctgaacaaccagttctacccgggcacacgcctgagcctttccatcggccacgccacctgtctgcagggcgaccggctgaatgaggtcgtcaagctggccgacagccgcatgtatcaagccaagcgcgactactacaccacgctggccaacgaacgccgccgcgattgaagcctggcggctcagcccggcgtgcattcgccgcgcatcagcgcccactcctcgcattgcttgcctgacgggaagatgcagatgccggactggccggccggggtcgacacgatctgcagcttgccgccgcgctgcgtgcagttgacggaggcggggttgggcttgccgattgtctgggcgctccccgggcgctctgccggggtgttgctgcaagcggccgcgccaacgacagcgaaggccagcaacactgcaatacgggtgcgcatcgggatctccgcgaggaaaagaaacgggcccattgtttgctcccctctcccgcctgcgggagaggggagcaaaccgccggattttgcttcttacaggaagacgatcagccccacgcccagcacgatcaggccgaacttggtgacgtagtaaagctggcggttccaggccttgaagcggcggcgatactggccgcccagccagacaaagcggaacagccggttgatcatgccggtctggtcgtgctcgtcattgggcgagctggccgcggtcatgaccttgcggcccatccagtggttgaacttcgcagcccagccgtagcgcatcgggcgctcgatatcgcagaacaggatcagccggttggcatcgctgcggttctcggcccagtgcaggtaggtttcgtcgaagaccacgccctcaccgtcgcgccagctgtggcgctcgccgtcgacctcgataaagcagcggtcgtcgttcggcgtggccaggcccaggtggtagcgcagcgagccggcgaacgggtcgcggtgcgggttgagcttgccgcccggcggcagctcggcaaacatcgccgccttcaccgtgggcagctcgcgcagcagcgccacggtcttggggcagagctgctcggccgacgggtgctgggcctcgtaccacttcaggtagaagcgcttccagccgtacttgaagaaggaattgaagccggcgtcgtcgttcttgtccgctgccttgatcttgcgcatcgcggtcagcgccagcccttcgtcgcggatctcgggccaggcggcgcgcagcttttccaggtcggggaaattgtcgaccgggatgtacggcgtgcggggcacgcccgagaacgcatacatgaagcagttgatcggggccaccagggccgaatggtccagcagctggcgccagatgcgcaggcgcaccttgccgcggaagtgcacatacagcacggcaccgaggtagcccgcgacgataatccacttgatcaccgaaatcctcctggtcagccgcctccgccgcgtgtcagtcacagcgcggaccggctgggtgaaaacgcgtattttagcgaaacggcagagccgccgcagcttgagacgattgcggcacatggcccgcggtgcgggccgggaagtcaggctggcgcgttcaggccccgccgcgcgactgccgcgcgatgcgctcgatcagcgcctgggcgtcgtcgggcaggccctgcagcctcagcaagcgcgcgttcagcaccaggttttccagcaccagcttggctgtcgaggcccacatcgtggccagcagcgcttccaccggcaggccggacgcctccatctcgctggagcgctcggcgatcagccggcacgccagccggcgcagcgcagcgtcgtcgaacggcaggtcggcgtagtcgatggggtcttccttctcgacttccgtcatcagttgcagcagggtgtcttctgtcatgggcagactcctggccaggcaaggcgcgtgggctacacgcggaaatcagcagccatgtcggcatcggtgcgcgcctcgaggcgccccgaacggcacgcggcgacaaactgatcgtagtcgcgctcgacctggtcagcatagccattggcatagcctaccatcgcctcggccatgcggtcgctgcggcccaggtagccgctgacctcggcggccagtccgctggccttggcgtgcgcccgcgccagcacccagccacacagcgaggcatagcggccgagcagctcgccgtccatcagctcgatctgtgccgacagcttcatgtcgcgcagctgccgcagatagaagtgccgcccgaacggccccttggtccagccgaggaacaggtcgctcgcggcctgcatcagccgctggccctcgaccacgcggcggccctcgtgcgcggtcggcgcgctcttgaagtaacgcgccaccaccgacctggtggcctccttgacctgcaggaacagcggcttgtcatgctggtccaccagcagctgcaccaggcagcgcttgcccacgctgcccaccccggccaccttgaaggccaggtcatggcgcgtgaaatggccgagcagccggcgccggtcggcggccagcgtggacaggtagtcctggtaggcctggtccagcgccaggtccgcgtcgctggcggccagccagtcgtcgtccggcccgaacagcgtctgctcgccgcgcacgtggaagatcgccggcggcgcatcgagtatcgaccagcggtcgccgatgcgctcggccagcttgggcagcagcgactcgtgggtgcggtcggcggcgcgctccatgccgcgccggatgcgtttctggacttcgggcaaggtgtcttcttcgagcagccgctcgaaggtaatgcggtcgtaccaggtgtcgagcatgcccatttcgccataagcgagcatgcggcgctggtagctgcccaccgcctcgcgcaccatgtcttcggccacagcggacttgtgccgcaggtggcgtgccgccaccacgaagcttgcgcacaggcgcttgaggtcccattcccacggaccgggactggtttcgtcgaaatcgttgaggtcgaacagcagcgcgcgctcgggcgtggcaaagccgccgaagttggccaggtggcagtcgccgcagatctgcatatgcaggccggaatccgcggtgccggccaggtcgtgggcctggaggatggcgctgccgcggtagaacgcgaacggcgactggatcatgcggccgtagcgcagcggcaccagccgctcaacccggccctggctgctgatttccagcagttcgacggggtcgcggtcgacgttgccgatggcctcgtgcgcaccgcgcggcacctgctggcgggcggccctgccgcgctcgcgccgggcctcgacagtacccttggccacggcttgcccgccctcctgacgtgtcgccaccatgcccccaatgccggcgccgccggcggttgccatttgtgcagcatctgcaacagaagctaatgcactgcgccgcggcttgtcaatcggcaggccacggcgcgggtcaggctggggtcgggcggatgtgcgccgtggctcagagcgcaggcggctggcgacggaaaccgacgccgaagcggttccatgcattgatggccgagatcagcagcgtcaggtcggccatttccttttccgagaattgctctcgcaagtcctggtagtccgcatccggcgcctggctttgcggcagcagcgtcagcgcctcggtccacgccagcgcggcgcgctcgcgcggggtgaaccagctcacttcacgccaggccggcagcaggttcaggcggcgctcgctttcgccatgcttgcgcgcatcggtgatgtgcatgtccaggcagaacgcgcaaccgttgatctgcgaggcgcggatcttcaccagttccttgagcgtggtctccagcgagcagcgtgccagatagacctccaggccaatcattgccttgtaggcgtcaggggccacgtcttgccagttcatccgttcttccatgatcgatctccgctttgacaggttggattcggcgggcactggtgtcgcgcccgttgggatgaaagatagacccatcgattggccccgcacactgccaatttccggcagaatcagtagaccaatcctgaccgacgcgtaccttatggaactgcatctcgccctggaccaagccagcgacctgaccgcgcagatcgtccaccagatccgcgacgcgatccagggcggccggctcgaggccggcgcacgcatgccgcctacgcgcctgcttggcacccagctgggcgtggcgcgcaagacggtgaccacggcgtatgaacgactggtggccgaaggctggctgcacgcgcgcgtcggcgacggcacctatgtggccgaggggctggcccgcccggccatgcgcatggcggcggcgccggtgctgccgcctgccgtgcagcgctggatggcggtgccgacgccgttcctggactccggcggcggcgcgcgctctgggttccagccggggcaggccgataccacgcgctttccgcatgaagcctggtcgcgctgcgtgcgcgcggcgctggccgccgagcgccagcgcccgcccggcgtcgccgatccggccggtgagatggtgctgcgccaggccattgcccgccatatcgccttcacgcgtggcgtgcagagcatgccgaccgacatcctggtcacgggcggcgcgcaacagggcatcgacctgctggcccggctgctgctcgggcccggcgccgtggtggcgatggaggatcccggctatccgatggcgcgttcgttgttccaggggctgggcgcacgggtggtgccagtgccggtcgatggtgaagggctggtggtggaggcgctgccgaacgatgccacgctggtctatgtcacgccatcgcaccagtcgccgctgggcgtgccgatgagcctggcgcggcgccaggcgctgctggactgggcggcactccgccacgcggtgatcctggaagacgactacgacagcgaattccgctacggcggccaggcgctggacgcactgcagacgctggaccggcatggccgcgtggtctacctcggcacgttctcgaagacgctggtggccaacctgcgctgcggctacctggtggtgccgccctggctgatgccggccgcgcgcaaggtcaagcacctgatggactggtacacgccgacgctgatccagcaggcgctggcgcgcttcctgtccgagggtcacctgctgcgccatatccggcgttcgcacgcgcgccacgcccagcgccgcgcccgcctgctggcgcggctgcacggcgacctgtcgccgtggctggagccgctgccggcaatggcgggcttccacctggcggcgcggctgcgcgtgccggtggcgtccgaggcactggtctcgactgcgcgcctggccggcctggcacttgccacgctcgatccctgctatgccacgccccctgctacctgcgcggggctgctgctgggcttcggcgccatcgacctgctggatatcgatcctgccctggaccggctggcaatggtactctctgcactggtacctgagccggcgcacgccacgtgatgcgggccgcacaggagcgataccaggtgacgcatgccacgcgcatgccatcacagcgacatggcgccgctgtcatgctggtatttcgcaaaccgacgtgaacaaaccggaagcgtgcgggtctcattcgcactttccacacaaccagagtcgcgttcatgaccaagcgtttgttgtccgccatgcgtcagtacgcatggtttgccggggtgaagcaccatgtcgtgcagggcgtcgaagccctggcggaactgctcaagtccccttccgccgcggcgcgcgccgtcgcggccatcgttgccgaaaccgagcacggcgtacaggtctgggtctcgtacttcggcaagccgctggatccgcacaccaactacgtgctgtggcccaaccgcgcgctgcgcccggcgcggcggcgcatccagccctctccgatcgaactgttgcagatgcagcgacggcgcgacggatagccgcgcctgcttgctggctgacgggatgcagcgccgccggagttcaggagtccgcccagcggcgcagcaggttgtgataaaccccggtcaggccgatcaccgattcatgcgcctggccgagttcctgcgccacctggcggatacgcgcgtccagctcgaacagcagcgcgcgctggccatcgtcgcgcaccatgctctggatccagaagaacgatgacacccgcgccccgcgcgtgaccggcgtcacgtggtggatgctggtggccgggtacagcaccatatgcccggccggcagcttcacgcgctgctggccgtaggtgtcctcgatcaccagttcgccgccgtcgtattcgtctggctcggtcaggaacagcgtcgccgacaggtcgcagcggatacggaagctggtgccgcgcaggtagcggatcgcgttgtcgacatggttggcaaaggtatgcccgccttcatagcggttgaacagcggcggatagaccttcagcggcagcgccgccgagaagaacagcgcgttgttgccgagcgcgtcctggatcaggtcgcccacctggcgcgccgcggcgagccctccggcaactgcaggttgcgcttggccagcgccgactggtagcccgaggtctcattgccgtcggcccacgccgccgcgtcgacgacctgccggacttgcgccacctggcgccttggacagtacgtcgggaatctgcagcatcatgatggcaataatgtcgggatgaatcgggcaggtgcacattgtatgggaagcgcggcagggacccgaacaagaatcattaccgtttgatcctgtgcaggcggcggcttcactacaatgggttctgtatccccgtcaccgacaaggagccgacatgtccgaaccgctacacgatgaagcgctggtcaatctctacctggaacgcatctcggctctctcggtgagcgccttcgatggtgccgatgtcagcggcgagctcgatgcggtgatgcgcgaagcggtaaccaagtgccaggccgcgggcgggccgcaggcgcacggaacactgacggtgctggccacgcggctgcgtgagcatgccgacgccgcggagcgtgaagaccagccgctggtgcgcgataccttcaggcgtgcggcggaactggtgcgcacctagtggtgccagcgcacgaacgctgcaaggcatgcctttgggttgcgcggaatgacatcggagcagtgagtgagtcaggccggacggccttgagaacaacgccttgaaggactgcggcgaatgccgctggatactgatataaggcgttggttgcgggggcaggacttgaacctgcgaccttcgggttatgagcccgacgagctgccaactgctccaccccgcgtctgaaggagacggattatgggtgattcatccgcgcatggcaagcgctattttgccgtgcgcatgaaatcgttcgctcgtgcctcgcgccatcatgcaatgcgcctgactttgccgtccggttcgtgcgttgcaagcaaggcttcgacatagcgattgacgtgttcgagcgcctcgagcttggtgtcgaacggctggttgggaaacgggttgtgccgcctcgcgagaatctgaccgtcggtgcggcgcatgatctcgatcaggatggcccacttggacctgggcagcgcaatcacttcatagacgatcttgtagcctgcatattccggcatggcggggggcactccgttctgctgcaatggcgagcgagacttcgctcgcttcatttccagcgtaggagtgccgcgcaggatcaagaatgatccgcgtcaatagcaatagatcacggcatgatataagccgttgcgccaaccacaatgacgcgcaacccttattcggcgggcccgagcagtcggtccaccagggcatagcccgcgccgaaggcagccacctccgccgcatggcgcgtggcgaactgctgcgggccgctggcaagcaactcggtatcgcccgcgtcggccgggtcggcgccttcctgcgacacgcggacttcatagccccaacggccgatgctgtcctgcccgtgcggcgataccaggacatagacatccatgccgcggtactcttcaacgcgccactctgcgttttccatgcgctcagctcccagggtcgaggttgtgcctgattcgagcctaggaggccgcacgcgcgaccgcaaggcgtgacgcagcaatcgcaggtttgcgtgggtgcagacggaaagcgggaacggtagccgcggcgcgcaagtcgaacggcacgacggcgaaaggacggaaacgaaaaagggcttccgtttccggaagccctcttctttctgcataggtggcgcggctggcaggattcgaacccacgaccccttggttcgtagccaagtactctatccaactgagctacagccgcacgcgagaaaaagattataacccagtttttatttttgggaagccccttcgcaacttttttgtgatctttctttggaaggggtgcagcagatgcccgccggcgaggttcgcctgtggcgttttcctataatgacagatccaagaagtgatccggaacatgaacaaggcatttgtcaaagagtcgtccggcgacgaggacgacgacctccccgaaggcgcaacgccgctacctcccggcaccaagaactacatcaccgccgaaggctacaaccgcctgcgcaatgagctgatgcagctgatcgacgtcgaccggcccgatgtagtgcagatcgtgtcgtgggcggcctccaatggcgaccgctcggagaatggcgactatctctacggcaagaagcgcctgcgcgagatcgaccgccgcatccgcttcctgacgcgccgcctcgacaaggcggaagtggtcgacccgtcgctgcagggcgacaacgaccagatcttcttcggcgccaccgtcacctacgccaatcgtgccggcgaagaaaccaccatcaccatcgtcggcatggatgaagtcgacctggacagcaaccacgtgagctggatctcgccgatcgccaaggcgctgatcaaggcgcgcgagggcgacaccgtggcgctgcgcacgccggccggggtcgagcagatcgatatcctggaagtccgctacccgtcgcggaaacaatagcctggagtggaggccgttttagggcggccctggctaggcgtgcggccgcagacagtacaagtagcacggcaaggccgcacaacgacgccagggccgtcctagaacggcctcctagccgtcgttgcggtcgcggaatatccggatgacgtccgggttgcggcgcagcccgcgcatcacgttggccaggtgcaggcggttctgcacctggatgataaactgcatataggtggcttcctggtggccggcgtcctgctgctccatggccacgtgcgcgacgttggcgtcggcggcggtcaggtcggcagccacgcgcgcaacgatgcccttgacgttgcgcaccatcaccttgatcgacacgtcgaaggcgcgcgtggtcttcttggcccacatcacgtcgatccagtgctccggatccttgctgtgcaggcgcttggcgatcttgcagtcctgcacgtggatctgcagcccttcgcccttgcccaggtagccaacgatggagtcgcccgggatcgggcggcagcacgccgagaagatcatcgacatgccttcgtcgccggtgatcggcaccgcgggcgcttcttcgccggcgaaggtctgcaccgccgccagcagcgcgctgtcgacatcgccggacagctcctggagcaggatctccatgcgcttggccaccaccgccggcacgcgccggcccagtgccaggtcggcaaagatgtcttcgcgctgcttgttgccggtccactgcaccatgcggtcccacaccgactgcggcaccgccttgagctcgaagccgagctggcgcgccgactgttccagcaggcgctcgccaagctggatggcttcgtcgagcttggtggtcttcaggtagtggcggatcgccgcgcgcgccttgccggtgcgcacgaacgacagccacgccggattgggcttggagtacggcgccgtcaccacctcgacgatatcgccgctcttgagctcggtgcgcagcggcaacatctcgttgttgatcttgaccgcgacgcactggttgcccaggtcgctgtgcaccgcgtaggcaaagtccagcgcggtggcgccgcgcggcagcgcgcggatatggcccttgggcgtgaacacgtagaccgcatccgggaacaggtcgatcttgacgtgctcgaggaattcctgcgaatcgccggtctggctctggatatcgagcagcgactgcagccactggtgcgcctgctgctggatatcgttggcgtgatcggcctggtgcttgtacatccagtgcgcggccacgccggcctcggcgatctggtgcatgtcgcgcgtgcggatctggaactccaccggcgtgccgaacggacccaccagcgtggtgtgcagcgactggtagccgttgatcttggggatggcgatgtagtccttgaacttgccgggcatgggcttgtacagcccatgcagcgcgcccatcgccatgtagcagtgcatctgcgtttccaccaccacgcggaaaccatatacgtccagcacctgcgagaacaacagctgcttgtcgtgcatcttgcggtagatgctgtagagcgttttctcgcgcccggacagttcggccacgatgccggcgtcggccagccccttctgcgcggcttccaggatacgcttgaccacctcgcggcggttgccgcgcgcggccttgacggctttttccagcgtggcgtagcggaacggcgagccgaccttgaaggacagctcctgcagctcgcggtagatcgtgttgagaccgagacggtgcgcgatcggcgcatagatctccatggtctccagcgcgatgcggcggcgcttctccggcgggacgaagtcgagcgtgcgcatgttgtgcgtacggtcggccagcttcaccaggatcacgcgcacgtcgcgcgccatcgccagcagcatcttgcggaagctctccgcctgcgcctgctcgcggctctggaattcgagcttgtccaatttggtcaggccgtcgaccagttcggcgaccttggggccgaatttctcgaccagctcgctcttggtgatgccctggtcttccatcacgtcgtgcagcagcgccgccatgatggactgcacatccagcttccagtccgcgcacagctcggccaccgccaccggatgggtgatgtagggctcaccgctctggcggtactggcccaggtgggcttcgtcggaaaactggaaggcctcgcgcacgcgcgccaggtcgggcgccttcaggtacgcgagtttctccatcagccgggtgatggagatgacctgctggcgcggcggcaccgccggctgcgaggtcgggccgaagaagtgccggtatgactgcgccagcactgcgtcgataaacaggctgtcagccgccggcgccacatcctgcatcgcggccagctcgtcctgcagcgccgcgcccctggacttgcccggcgccagcgcgggcgcgacggcacgctcgccgacgacatcgtcgccgagcggatcgggaagattgggagcgccggtgcgcgcgttcacggagggctggcccggaatggtgcgcttaggcgccgtaggcggggccgcatcgccaagcgccggcgccacggcagtcggcgacggctgggagggaggcttggagggcgaatgcggcgaaggcatggcggcggcccctggaatccggctggatacgtgctggcacgatgcgaggataagccatgggccgcctgaccaatcaggtcgggaccttcttcagcatctcgatgccgacctggcccgacgcgatctcgcgcagtgccaccacggtcggcttgtcctttgcttcgactttgggcgtgtggccctgcaccagctgacgggcacgatacgtggccgccagcgcgagctcgaagcgattcggaatgtgtttcagacaatcttcgacggtaatacgcgccatatcaaatccaccttgggacaaaaccttacgttgggttgctattttacagcacgcggcggaaaacgccggcggcgccccgcgcggctgtcatcggcaggcatcggctcagtggatgcccagctcgataaacagctccgtatgccgtgctttctgcgaggaaaaccgcagccgcgtggcgctgatcacgttgcgcaactgctccagagcatcgtcgaagacctcattgatgatgacgtagtccgactccgaggcgtgggccatttcactgcccgccgccagcagccggcgcacgatcacattgggctcgtcctggccgcgttttttcaggcgctcttccagcgccgtcagcgacggcggcaggatgaagatctcgaccgcgttggaaaagcgctggtgcacctgctgcgcgccctgccagtcgatttccagcagcacgtcgttgccctgcgccatctgctgctcgatccacacgcgcgaggtcgcatagtagttgccgtggacctcggcccattccaggaagtcgccgcggtcgcgcgcggcgcggaacgcgtcgaccgtgacgaagtggtactcgcgcccgtcctgctcgcccgggcgcggggcgcgcgtggtgtgcgagatcgacaggcggatggccgggtcctgcgacagcaacttgttgaccagcgtcgacttgccggctcctgacggcgccaccaccatgaagaggttgccggggtagacggtatcgatggcagtgtgtggcgcggattgaggcgttgggctcatgatgattctttggtgattcctgaggctgtctttattcgagattctggacctgttcgcgcatctgctcgatcagcagcttgagctccatcgaggcatcggccagttccttggcggcggccttggagccaagcgtgttggcctcgcggttgagctcctgcatcatgaagtccaggcgcttgccggcctggccgcccttcttcaggatatgccgggtctcgttcaggtgcgcctgcagccgcgacagctcttcggcgatgtcgatgcggatgccgtagacggtggcttcctggcggatgcgctcggcgatctcgtcgcggctcatcgacggcatgccggtgggcgcggccaggttgaaggcttcctgcaggcgctcggtcagcttttcctggtggtgcgcgatcagctgcgggatggtcggcgtcaggcgctcgacgatcgccagcatggcgtcgatgcgctccatcagcgtcgccttgagcgcgtcgccttcgcggcggcgggcttccagcagctggtccagcgcctcgcgcgcggcgcccagcaccgcctcgcgcagtgcctcctgcgacagttccggctcgaccagcacgcccggccagcgcaggatctcgcccatgcgcagggtgccggcgctggcgaaggtggcggcgacggtggtttccagcgcgcggatctgcgccagcagcccctcattgagggccagggtggcgccgccggtgtcggtgcgctgcaggttgatgcggcactccagcttgccgcgcgacagctccgccatcagcatctcacgcagggccggctcgaacgcgcggcactcttccggggcccggaacaacaggtcgaggaaacgcgaattgacagtgcggaattccaccgaaacggacgcggagcgcccgctgggctcgccttgcgcgttggtcaatggcgcctggcgcgtcgccaggccatagcctgtcatgctgtggatcattggatgttctcgtgaatggcggcggccccgggctgctggcgaccggcgggtcccgcctcgagcgccccgtacgggattccggggagctctcaatacgttgaaaggagggcaacaatgcccttatttgtgttctttacaagtgaccgattagcccggacaatccggaggcaaatcaggtccctattcccatgacagagccaaagggcacgacacaaccgaagagtgcaccgctgcccgtcggcacgctgttgtccaactatcgtattgtaaagaagttggccagcggggggttcagtttcgtctacctggccaccgacgataccggcgcaccggttgccatcaaggaatacctgccggcgtcgctggcgcggcgcaacccgggcgaactgatccccgtggtgcccgaggaaaacgccgccgcgttccggctgggcctgaagtacttctttgaagagggccgctcgctggcccgcatctcccatcccagcgtggtgcgcgtggtgaatttcttccgcgagaactccaccgtctacatggtgatgaactacgagctcggcaagacgctgcaggagcacgtgctggccgcccggcagcaaggcggccccaaggtgctgcgcgagcatttcatgcgcaaggtcttccacgacctgatgagcggcctgcgcgaggtccatatccacaagctgctgcacctggacatcaagcccggcaacatctacctgcgcgaggacgaatccccgatcctgctggattttggcgccgcgcggcagaccctgacgatggaagcggcccgcttccagccgatgtacacccccggctttgccgcgcccgagctctatggcaagcattccgacctgggcccgtggaccgatgtctacagcctgggcgccacgctctatgcctgcatggccggcatgccgccgcaggaagccaaccagcgtgaaaaggaagaccgcatgggcgatgccctggcgcggctgcgcagcagctacaccaacgggctggtggacctggtcgaatggtgcctgcggctgacgccggccgagcgcccgcagagcgtgttccggctgcagaaggagttgcgcgagcagaccaacgccctcggcgaacaggcgctggcgccgcagacgcaagccccggccctggcgccggcggagcggcccgcggcgacctcgcgcttcctgaccctgctgcgccggcgtgacgaacccgtccccggcgcgagcgtcgactgaatcacaaatctggcgccccgcttgcggccagtccactgaattccctgaaagccaacatgcgattctctgtctaccaggaaagcaggaaaggcggccgccgcgtcaaccaggaccgcatgggctattgcttcacgcgcgacgcgctgctgatggtgctggccgacggcctgggcggccatgcgcacggcgaggtcgccgcgcagcaggcgctgcagacgctggcgcgccagttccaggtgcaggcgcggcccacggtgcgcaacccggccgagttcctgcaggacaccatcatgctggcccaccgcgagatccaccgctatgccgaggccaaccagatggcggacgtgccgcgcaccacggtggtctgctgccttgtgcagcagggccagatctactgggcccatgccggcgactcgcgctattacctgctgcgcaagggccggctgctgacgcgcacgcgcgaccactccaagatcgagaacctgctgcagcaggaacgcgtgctgccgatgcatgtggccaaccacccggagcgcaacaagctctacaactgcctgggctcgcccaacctgccgctgatcgacctgggcggcccggtgcggctggagccgggcgacgtggccctgctctgctccgacggcctgtggggcgcgctcgaagagcccgcgctggtggacaagctgtcgcgcctgtcggtggtgcaggcggtgccggcgctgatcgagcaggcgctgcagaacgccggcgaaggtgccgacaacaccaccggcatcgccatgatgtgggaactggacagcaatgcggcggggcaggattcggtcatgaccgacaccctgccgctgaacgccttcaccacctcgatcctggagcgcaccggcactgacagcgacctgctgtccgaagaggagatcgagcgctcgatcgcagagatccgcgccgccatcgacaagaccagcaacctgatgcggtaatgccctccccgcgtgcgatgcggcgctcaagggctggcggcgttagaatcgcggtctctccccgattcggacaaaccatcccatgcgacccagcggccgcgcagccgatgcgctgcgttccatcagccttacccgccactacacccgccacgccgaaggctctgtcctgtgtgcctttggcgacaccaaggtgctttgcaccgccagcgtgctggccaaggtgccgccgcacaagaagggcagcggcgaaggctgggtcacggccgaatacggcatgctgccgcgcgccacgcatacccgctctgaccgcgaggccgcgcgcggcaagcagaccggccgcacccaggaaatccagcgcctgatcggccgcgccatgcgctcggtgttcgacctggcggcgctgggtgaatacaccgtccacctggactgcgacgtgctgcaggccgacggcggcacccgcaccgcggccattacgggcgcctttgtcgccgcccatgacgcggtttcgaccatgctgcgcgacggcctgatcgcggccagcccgatccgcgaccatgttgccgcggtctcggtcggcatggtcgacggcgtgccggtgctggacctggactacgccgaggacagcagctgcgacaccgacatgaacgtggtcatgaccggcagcggcggctttgtcgaggtgcagggcaccgccgaaggcgcaccgttcagccgcgccgacctggacgccatgacgcgcctggccgaagccggcatcgcccgcctggtgcagcaccagcgcgaagcgctcggcctggcctgagcagcgggacccgcgatgcaacgcctggtactggcttccaacaacgccggcaagctgcgcgaattcggcgcgctgctggccccgctcggctttgacgtggtgccccagggcgaactgggcattcccgaggccgaagagccctttgccaccttcgtcgagaacgcgctggccaaggcccgccatgccagccggctggccgggctgcccgcgctggccgacgattccggcatctgcgtgcaggcgctggacggcgcgcccggcgtctattccgcgcgctatgcgcagatggccgggcaggccaggtcggatgccgccaacaatgcgcacctggtctcgcaactggccggcaagctgaaccgccacgcgcactactactgcgtgctggtgttcgtgcgccatgccgaagacccctgcccgatcattgccgaaggcctctggcacggcgaggtcgtcgacgcgccgcgcggcgcgggcggctttggctacgacccgcacttcctgctgccgcacctgggcaagaccgccgccgagctatcgcccgaagagaagaacacggtcagccaccgggcccaggcgctgcgcgcactggtggcacggctgcaggccgatgccgcgcaaagcgccacccgatgatcccgatcgtaccggtctccgcgtccgtgcccgtggacagcaagcagctctggctcaagcccgggcagatcagcctgcccggctcgccgccgctgtcgctgtacgtgcatatcccgtggtgcgtgcgcaagtgcccgtattgcgatttcaactcgcacgccgcacccggcgccgacaaccacgagatcccggaagacatctacctggacgcgctgcgcgcggacctggagcagtcgctgccgctggtgtggggccggccggtgcatacggtctttatcggcggcggcacgcccagcctgctgtcggcggcaggcatggaccggctgctgtcggatatccgcgcgctgctgccgctggatgccgacgccgagatcacgatggaggccaaccccggcaccttcgaggccgacaagttcgccagctaccgcgccagcggcatcaaccggctgtcgatcggcatccagagcttcaacgaccggcacctccaggcgctcgggcgcatccacggcggtgccgaagcgcgcaaggcgatcgacatcgcccaggccagcttcgacaacatcaacctggacctgatgtacgccctgcccggccagacgctggatgaatgccggcaggatgtggaagccgcgctgtcgtacggcaccacgcacctgtcgctgtaccacctgacgctggagcccaacaccctcttcgccaaattcccgccggcgctgccggacgacgacagcgcgtacgagatgcaggactggatcgaagcgcgcaccgctcaggccggctaccggcactacgaaacctctgcgtacgcaaagccgcatcgcgaggcgcgccacaacctgaactactggcgcttcggcgactacctcggcatcggcgccggcgcgcacggcaagctgtcgttcccgcatcggatactgcgccagatgcggcacaagcatccggccacctacatggagcgggcgctggccggcaatgccgtgcaggaagcgcgcgatgtcggcgccgacgagctgccgttcgagttcatgctcaacgcgctgcgcctgaccgacggcgtgccggcatcgagcttccacgactacaccgggctgccgctgcataccatcagcaagcagctggccgaggcggaaaagaaggggctgctggaagcggacctgaccaccatccgcgccaccgagctgggccggcgcttcctcaacgacctgcaggagatgttcctgaaggactgagcgccgacgggcaccggtacaaaaaaaagccacgcgatgcgtggccttttacatgctggcaaacgtcaggctggcatgtcagtacggcgttgccatgtcattggccacgcgtgcgcgcatgcccacctgcaggttgcccaggctcgactgggtcaccgtggcgatgcggccatcatccaggcgcacgttgacgcggtacgcggtctgggtgttgctgcccgcgcgcttctcgatctggttgccggccacggcgccgaccacggcaccgccgatggtcgccgcggtctgcccgcgtccgccgccgatctggtggcccagcaggccaccggccgcaccgccgatcacggtgccgagcaggcccgagctgccttgcgtactggtgatcggttcaatcgattccacgcggccgtagtacaccgcgccagccggggcctgcgaggtgttgggagtctggtaccccggaggcggggcgttgtagccggtgttgtagccgctgtcatacggagcggcacaaccggccagcacagccgctgcagccaccggaacgatcagccatttcttgctatggattcgcattttgagttctcctctgttgccaggcgaaagccggggatgcggcacacaccgcgccatccggcacgacaatatgagcgatgccggcgtgtgaaggttccgtaatgtcagacagacgccgacatccgcggcagcggatgtggcaggaagtttacgcgcgcttgcgtgccgcaacacaagaccaccatcgatccacgcgagccttgtataatgcgcggcctgaccgtcgggtctgcaggcggcagcgcgccgggcccatgccctttcgcgctacaatgcccgcacttccaggaagcgtggccgagtggtttaaggcagcagtcttgaaaactgccgatggggtgacccatccgtgagttcgaatctcaccgcttccgccagacaagagaaacggcccgcaccagtaactggtgcgggccgttcttcattagagatcgccgtgcaggtcttgcgtcagcagacggtacgcctcggcttctgaaatcctgagccggtacttgcacgccagcacgcgcgccaggccatgcgccgcgcccggcgggctgtgccgcaattgttcgcggtaggcctccacttcatagcgcaggcgccagcgccggctggccaggtagagcacgcccatcaggccccagctgcgccagaactggcgcacatgcaccttctcatgctcgatcagcgcctggctggcgccggggcgcagcaggatcagcggaccgggcgtgaagccgtcaaacccgcgcggtatcagccagcgggtttcgacgaccaggcacaagggcgagcggcaatagcggagcatgcacctagcatagcgcggatgccgccgccctgccgctggctcaggccgccgcccgcagcggcgcggaagcggaggcggccagcaccccggcctgcccgcgcgaacgtcccgagctcaggtaccctgcgatcgattcctgcgtgacctcgcccaggtaggcgccgtccgcgcccatcaccggcagccagctggtgttgtgctggtacatgcgcgacagcacgatgcgcaggtgctcgtcgaaggccgcggtgacggcgaacgggcgcatcacgtcgctgcactgccccttgccggatcgcgcatcgcggcgcgtgacgtagcccagcgcgacctgggcgtcgtccaccaccggcaggtggcgcacgtcggcatcgtccatcacgcccagcgcttcggccagcggcatgtcggggcggcagctcggcggcatggtggcggcgtcgccggcgcgcaccagcagcagtcgcttgagggtgttgtcatgtccgacgaaggcctgcacgaactcatcggccggatgcgccagcagcgcgtcgggatggtcgaactgcaccagcttgccgcggcggaacaccgccaccttgtcggccagcttgatcgcttcgtcgatatcgtgcgagaccatgatcacggtcttgccgagctggcgctgcatctgcaggaattcgttctggatgctctcgcggttgatcgggtcgaccgcgccgaagggctcgtccatcagcagcagcggcgcgtcggccgccagcgcgcggatcacgccgatgcgctgctgctgcccgccggagagctcgcgcggatagcgcttcagcagccggttgggatcgagctgcaccatcgccatcagctcgcgcgcgcgctcgcggcattgcttcttgtcccagccgagcaggcgcggcaccaccatgatgttctcttcgatggtcatgttggggaacaggccgatctgctgaattacgtagccgatcttgcggcgcagggtcacgccgtcaaggccgcgcgtatcctcgccctcgatgcgcaccgtgcccgaggtcggctcgatcagccggttgatcatcttcagcgtggtggtcttgccgcagcccgaggggccgaggaagacgcagatctcgccgcgcggcaccgtcagcgacacggtgtcgacggcgcgcgtttcggtgccgtctttctgcgggaaggacttggtgagttggtcgagttcgatcatatgcggattccctttggcgtcagtgcccgctgcaaccactgcaggaaggcgtccgccacgatggcgagcaggctgaccaggaccgcgcccacggccagcttgctcatgttgctctggctgatcgcctgcaggatcagcaccccaaggccacccgcgccgatgatggcggcaatggtggcaaccccgatattcatcaccacggcggtacgcacgccgccgaggatcaccggcaccgccagcggcaggtccaccagccgcatgcgttgccaggcggtcatgccgatgccgcgccccgcttcctggatgccggggtcgacattggccagcgcggtgtaggtgttgcgcatgatcggcagcagcgagtacaggaacaccgccgtcaccgcgggcacgtagccgagcgcatggccgaagcgcgcgaagatcgggatcatcagcccgaacagcgcgatcgacggcagcgtcagcacgatcgtcgccagcgccagcagcggcgtggccagcgcgcggaagcgcgtgatcacgatgcccattggcaccccgatcaggatcgccagccccactgccgagcccaccagcgccaggtgctcgccggtcattttcagcagcgtgggccagctgtgctgcaggtaagagaacaagtccatgcggcctccctcagatcagtccgtggctgcgcaggaagtcctccgcgaccttgtccaccggctgctggccgatgtccaccttgtagttcatgtcggtcatgctctcgttgtcgagcttggcagcgagtgcattgagcaggccggccagttccggatgcttgtcgagcaccggcttgcgcaccaccggcaccgcgttgtacggcgggaagaagtgcaggtcgtcttccagcagcaccaggtcgaagcccttgacgcggccgtcggtcgcatagaccaggcccagctccacctggttgttcttcagtgcggtgtagaccaggcccgggtcgagctggatcacgtcgcggcgcgagaacggcagcttgtacagcgccttgagcggctccaggccgtccgggcgcgcagcgaattccatgtcgaccgcgaacgggtggctggcgtcggagccggcgcggcgcatctgctcggcaaagcccgacagcgtggtcacgccgctggccgcgcgttcctttggcatcgccagcgcataggtgttgttgatgttcgaggcatcgagccacaccagcccgcgcgcgccgtccatctgcttgacgcgctcgtagctttccctggcgccgagtttttcctggaccttgttgaacacgatcagcgcggtgccggtgtagtcccacaccacgtcgagctggttgctctccatcgcctggcgcatcagcgtgctgcccaggccggcggtcagttcggtggtgaggcccttggcgcgcaggtatttcgaagtcatcgacgacagcagcagctgctcggtgaagttcttgccgcccacgcggatcggcgtggcctctgcacgcgcttcaggcgcagtggccagcgccagccccgccgcaaaagcggtgacggcagccaccaccagggcgacgcgccgggcacggcggcggatgaattgcatctggttttccatttcggtccccatgttcagcgcgccagcccgcgccggcgcaggtacagctggccggcggcggcaaagagcgcgtccagggccagcgccagcagcgccgtggcggccgcgcccagcagcagcagcggctggttgttcaggtagatgcccgggaagatcagctcgcccaggctgttggcaccgatcaggaaggacagcggcaccgtgcccacgttgatgaccagggcgatgcggatgccggccagcatcaccggcagcgcgttgggcaattccacgcgcaccaggcgctgcaccggcgtcatgccgatgccacgcgccgcttccagcagcgtgggcgagacattgcgcaggccttcgtaggtgttgcgcacgatcggcagcagcgaggccagccacagcgccaggatggcgggccgctcgccgatgccgagcacggccagggccagcgccagcaccgccagcgacggcacggtattgcccacgttgaaaacctgcatcaggcggtcggcccagcggcgcatgcacgggcggctcagcgcgatgccggccgggatgccggtggccagcgccagcgtcatggacagcaccaccaggcgcaggtggtcggccacgtcgtagagcaggcgctcctggtactggcgaatcacatcgacgccgatccatgccaccagtgcagccagcgcggccagcgtcagtcctgcccaggcgaagacccgtgccgattgctttgacatactctccccttttccgaaaccgaaaagcgcgcagcacgccacttcccggcgatggaaaacaatatgggctggtgcgtgcggagatagggcgccaccagtcccggttcagattgcattgccgccatgaccggcacgattgccggcggacggtctgtggattcctccgccgtgggcgggaagtccgattgacgggatgccgggttggattggcagtccctgaagcggcgcaaccggcgacgcaaagttgttgcgatcggttggccagtggcagcgcaaatattgaagttttccgacgcgccgccggtccatcggccgttgactggcaagggctggcgaggttttgacaccccgcatctcacctcaacggatgacaaagagagcgctattatagcgatcttcatcgatcctgtcatcttcccgcatttttccggccttcctgcgccgatcttgcgcgaattggcggcagtaggacggcatgttcggccgtgcattagccggcacacggcgacctcccggatcgttctgaattcgaaagaacctggaccaacagtcggtacgccagcagaacaatctgttgcccggcgaccctctactctttccgcgccaaaacactaaattgacgaggtagctgaaacgacgggaaaccggcccggccattgccgcgcggaacccgcccacaggagaaagacatggacacccttgccaccaccttcgccaccgttcccgccgccgccgccgaaaccgtgcaacgctcgcgcgccgtggaccgcgtggtgcggggcattgccacctcggacggcgccggcgtcaagctgacccgcgtgctgacgcagaacctgcagcgccggctggacccgttcctgatgctcgatgccttcggcaccgacagcaaggacgactacatcggcggcttccccgatcacccgcaccgcggcttcgagaccatcacctacatgctggccgggcgcatgcgccatcgcgacagcgccggcaacgaggggctgctgcagaacggcggcgcgcagtggatggtggcaggcgcaggcgtggtccactcggaaatgcccgagcaggaagacggccgcatggaaggcttccagctatggctgaacctgccggccgcggacaagatgaccgcgccgtggtaccgcgacctgcccgccgccgagatcccgacggtggcgctggacaacggcgccacggtgcgcgtgctggcgggcgccacgcacggcgtggccggcgcgatcacgcgcccggtgaccgagccggtctacctggacgtgcacctgccggccggccagacctttgcgcaggcgctgccggccgggcacaacgcgttcgtctacgtgtaccggggcgaggtttcgatcggcagcggcgacgaccgcgccgtgatcgaggcccagcgcatgggcgtgctggacaacgccggccagtctgacggcgtcatcgtcagggccgaggccgacgcgcgcttcctgctgatcgcgggccagccgctgaacgagccgatcgcgcagtacgggccgttcgtgatgaacacgcaggagcagatctaccagactctggcggatttccgcgacgggcgcttcgccaccaccggcgcctgagccctgccggcgagcggccgccctggccgcccgccgctgctccagtccagccgctggctccgcaaggagccggcggctttttttcgtgctgtggccggcacgcgacttgcaaccacccccaaaccgttgcagggactggaatgacgccggaatcggcccgcccggtgtcctgtcacttatataatccatcaccaatatcgggcatcaccaaaccatgatgaatgctgcaatgcgtcgcggcgatgctgcgccacgcactgccgcgctgttgactcatcccacgttgctgccatcacaacaacccgagccgcctcagtgacatcacaactccctcccaggctggcgctggcccatatcagcaagcgctacccgggcgtcgtcgccaatgacgacgtcagcctcagcgtcgcccccggcgagatccatgccgtgctgggtgaaaacggcgcaggcaaatccaccctgatgaagattatctttggcgcggtccgtccggatgccggcgagatgcacttcaacggggcgccggtcaccatcaacagtccgcacgacgcccgcaacctgggcatcgccatggtgttccagcatttctcgctgttcgacacgctgaccgtgaccgagaacatcgcactcggcctgcccgccggacagcaaggcaacataaagcagctggccgagcgcatccgcgccaccgccgagcgctacgggctgccgctggagccgaaccgccatgtgcatacgctgtcggtcggcgagcgccagcgcgtggagatcgtgcgcgcgctgctggccaatccgcagttgctgatcctggacgagcccacctcggtgctgaccccgcaggcagtggaaacgctcttcgtcacgctgcgccagctggccgccgaaggcaccagcatcctctacatcagccacaagctcgacgagatccgcgcactgtgccatcaggccaccgtgatgcgcatgggcaaggtcaccggcgtgtgcgatccgcgccaggaaaccgcggcctcgctgtcgcggctgatgatcggcggcgagcccccgcgcgagacgcgcgtggctgccgagcgcggcccggtgcggctcagcgtgcagggcctgtcgctgccgcgcgcgcatgccttcgcgaccgagctgagcaggatctcgctggatgtccacgccggcgagatcgtcggcattgccggcgtgtccggcaacgggcagcaggagctgctggccgcgctgtccggtgaagacacacgcgcagacaacatgtcggtgcagctcggcggcaagccagtcggccggctcgatgcgcgccagcgccggcgcgcgggcctggccttcgtgccggaagagcgcctgggccgcggcgcggtgccgggcatgagcctggcgaccaatatcctgctgtcgcaccagacgccaccctatgtgaggcaaggcatgatttcgcccggcgcggccaccgggctggcttcggccgtgatcagccgcttccgcgtcaaggccagcgggccgcacgcgctggcgcgcagcctgtcgggcggcaacctgcagaaattcattgtcggccgcgagatcgaaagcggccctaaggtactgatcgtggcgcaaccgacctggggtgtggacgttggcgccgcggcgcagatccacaacgagatcctggcgctgaaggccaccggctgcgccatcctggtggtgtcggaagagctcgacgagctgttcgcgatctgcgaccggctgcacgtgatcgccaagggccgcttgtcgccttcggtgccggccgagaccgcgacgcgcgagcagatcggcctgtggatgagcggactgtggcaaggcgggcccgcccaggcgcaatccggcgcggaggtggcaagccatggctgatgtgcgacaactgctgccccgctcccccctctcgctggcgccgcgtggcctgccctcgcgcaccatggcctatgcctcgccggtggtcgcactggcgctgacgctcctgttcggcgcgctgctgttcctggtgctcggcaaggaccccgtggccgcgctcaaggtcttcctggccgatccgctgcgcgaccagcgcgccatcggcgaggtgctgctcaagaccgtgccgctggtgctgtgcgcactcggcctgtcggtgtgctaccgcgccaacgtgtggaatatcggcgccgacgggcagctgattgccggcggcatctgcgccggcgccaccgtgctttacttcgatgtgccgggccaggccatgaacggcaccgtggtgctggtgctggcctcactcgccggcatggtcggcggcatgctgtgggcctcgctcacggcggtgctcaaggacaggttcaacgccaacgagatcctggtctcgctgatgctcacctatatcgcgcagcagctgctgctgtgggtggtcaacgggccgctgaaggatcccaacggcatgaacttcccgcagtcgaaggtgttctcgtccgagtacctgctgcccaacctgatgtcgggctcgcgcctgcatgccggctttgccgtgatgctggtgctggtggcggtgatgaccgtgttcgtgttccgcagctttgccggctaccgcctgcaggtgggcggcaccgcgccggcggcggcgcgctacgcgggtttctcggcgcgcagcgcgctgtggagcgcactgctgatctcgggcgccaccgcgggcctggcgggcgcgttcgaagtgaccggcccgatcggccagctgctgccgtcgatctcgccgggctacggcttcaccgccatcatcgtcgcctttatcggccggctgcatccggtcggcacggtcttcggcggcatcatgatgtcgctgttctatatcggcggcgagatggcgcaatcgcgcctgggcctgccgtcggccattggctgggtgttccagggcatgctgctgttcttcctgctggcctgcgacacgctgatcgaaaaccgcctgcgctggcgcgccaccacggcctgagcggagctacagaacaatatggaacaactcgctccccttatcgccaccgccatcaacgccggcacgccgctgctgctggccgcgctgggcctgctgatcaacgagcgctcgggcgtgctcaacctcggcgccgaaggcatgatgctggtcgccgcggtggccggcttcatggtcggctaccagacccagtcgccgctgctcggctttgccgccggcgcgctcgccggcatgctgatggccacgctgttctcgtggctggcgctggtgctggccaccaaccaggtcgccaccggcctggcgctgtcgatcttcggcaccggcctgtcggccttcatgggccagcgctttgtcggcttcgccatgccggcgcaggccaaggccgtgcccggcctggccgacctgcccttcttcgggccggccttcttccagcatcactggatggtgtatttcagcctgctgctgtgctttgccatcatgtggttcctgttccgcacgcgcgcggggctgaccttgcgcgcgatcggcgaagcgccggaatcggcgcacgcgctgggctacccggtgcgcaccatccgctttggcgcgctgctgttcggcggcgcctgctgcgggcttgccggcgcctacctgtcgctggtgtacacgccgatgtgggtcgagaacctggtcgccggtcgcggctggatcgcgctggcgctgaccaccttcgccacctggcgcccgggccgcgtgctggtgggcgcgtggctgttcggcggcgtgaccatcctgcagttctacctgcaagggatcggcgtgtcggtgccgtcgcagttcctgtcgatgctgccgtacgcggccaccatcgtggtgctggcgctgatctcgcgcaacccggcctggatccggctgaacatgccggcctcgctgggcaagcccttccggcccggcaatgcctgagcctcgagtttttttacggaaatccctgagctaccaacaattcatcacaaggagaaattatgatcgtcacgcgcaggaagaccctggcggccctggccgccaccgccttgctgaccctcgcgggctgcggcaagaaagaggccgacaagcctgccgagacggcgggcgcggcctccgcgcccgcggccgagcagaaggccgagccgctcaaggtcgccttcgtctatatcgggccggtcggcgatgccggctggaccttcgcgcatgacaacggccgcaaggccgtggaagagaagttcggcgacaaggtcaagacctccttcgtcgagaacgtgcccgaatccgcggccgacgccgagcgcgtgttccgcgacctggccagccagggcaacaagctgatcttcggcaccaccttcggctacatggagtcgatgctcaaggtcgccaaggaattcccggacgtaaagttcgagcacgccaccggcttcaagaccgccgagaacctggcccagtacgacgtgcgcacttatgaaggcgcctacctggcgggcgtggtcgcgggcaagatgagcaagaccggcaagatgggcgtggtggcatcggtgcccatccccgaggtgatccgcaatatcgactcgttcacgctgggcgcgcgcagcgtcaaccccaaggccacggtcaaggtggtgtgggtcaacaagtggttcgatccgggcaaggagcgcgaagccgccaccacgctgatcggccagggcgtcgacatgctgatgcagaacaccgactccgccgccgtggtgcagaccgcgcaggaaaagggcgtgcacgccttcggctgggacagcgacatgagcaagttcggcgacaaggcccacctggccgcgtcggtgatctcgtggggcgtctactacaacaaggtggtggaagacgtgctgaacaagcagtggaagaacagcaccacgtggtggggcctgaaggaaggcatgatcgacctgaagagcttcaacgccgatgtgccggctgacgtcaaggcgctggtcgaagagcgcaagaagggcatcgccgacggcagcgcgccgatctggaagggtccgatcaaggacaacaccggcaaggaacagctggccaaggaccaggtggccgacgacggcttcctgcatggcgtgaagttctacgtcgaaggcgtggaaggcaagatcccgggctgattcgccacgcagcccagccgcgcgccggtgacggtgcgcggcgcccgcctccgccgcgcgggggcggaatcgccacaattccccgccctgccgcccgttccgggcaccctccccgcaccgcccataccttgcggaacttgaagccgccgataacggcccaagctatctgtgcatgcgccagtaaccggcgcccgcaatgtgaaggaggcctctcatgtggaagcgattttcggccctgtggacgctggttcgccgcgacggccgcctgttctggtacgcgctgcgccatccggacgcgccgccctggctcaagcccgccgccatcgggctgctgctctacgcaatctcgccgatcgacctgatccccgacgtggtcgcgggcctgggcattgtcgatgacgtggtgctgattccgctggcggtgcacctgatcctgaagcgcctgccgccgcatatcctgcgccaggcgcagacgcgcgccaccgccaccacggtccggccgcactgacggcatcgctcaaagccaaagccccggggcagcgcctgccgccccggggcttttgcttgcctgcctggctgttgctcagttcggcagcaggatggtcgagcccgtggtcttgcgcgcttccaggtcgcgatgcgcttgcgccacctcagacagcgcgtagcgctggcggacgtcgatcttcaccttgccggtggccacggcgtcgaacaggtcggccaccatcggctccagcagttcgcggtgcaccacgtaggtcatcagcgtcggccgcgtcagccgcagcgagcccttgttgcccagcaccgacaggtcgaacggcggcaccgggcccgaggcgttgccgaagctgaccatggtgccgcgcggcgccaggcagtcgagcgagccctggaaggtgtccttgccgatcgagtcatagaccgccggcacccccttgccgttggtgatctccctgacccgctccacgaacgactcacgcgtgtagacgatggtgtgggcgcagccgttggcgcgcgccagttcggccttctcgtcgctgccgacggtgccgatcacggtcacgccgagcgccttgagccactgactcgcaatcaggccgacgccgccggcggcggcatgcagcagcaccgtgtcgcccggctgcaccttgtagctgtcgcggatcaggtactgcgccgtcaggccctgcagcatcatcgccgcggcggtgtcgaacgggatcgcatcgggcagccgcaccacgatatcggccggcatcacccgcacctgcgcgtaggcgccggtgggtcggccagcgtaggccacgcggtcgcccacggcgacgtgccgcacgccctcgcccaccgcttcgaccacgccggcgccttccatgcccagcccgcccggcagcggctgcttgtacagcccggtgcggaaatagacatcgatgtagttcaggcccaccgcctcatggcgcacgcgcagctggccgggaccgggctcgcccacctcgacatcgacccactgcatgacttcgggaccgccggtctgctcgatccggatggctttgctcatctgtgtcgctccttcgctatggtgttgcatcgatcgggaattcagctggccgccgcttcgtcgacctcgcgggcaagcccggcgatcaacagctcggcagtggccacgttggtggcgcagggcacgttgtgcacgtcgcaggcgcgcaccagcgcgttgatatcgggttcatgcggctgcggcgtcatcgggtcgcgcaggaacaccacggcgcgcaccaggcctacggccagttgcgcgccgatctgcaggtcgccgccccacggccccgacagcatgcgcgtcacctccagcccgacctcgtcgatcaggcgcccgccggtggtgccggtggccagcagctcgcactgcgaaaggaaggcgcggtggcgcgtggcgaaggcaacgatgtcgtccttcttgtggtcgtgggcgatcaacgcgatgcgggggcgagtcatcaggggttccttgttgcggggtcggtgaacgtcaggaaacaggagaaagcagcgggatcagaaggtgcccgggtaggcgccgccatcgagcaggatgttctgcccggtgatgtagccggcatggcggctgcacaggaacgcgcaggtggcgccgaactcggccggctcgccgaagcggcgcgacgggttcgccgcggcgcggcgctgcgccacctcatcgacgctcaggccagccttcttggcgccgccttccatggtcttgagcaggcggtcggtgttgaacgggcccggcagcaggttgttgatggtcacgccgtgctgcgccacttcgcgcgccacgcccgcgacaaagccggtcaggcccgagcgcgcgccattggacaggcccagcacatcgatcggcgccttgaccgcgccgctggtgatattgatgatgcggccccacttgcgcgcgatcatgccgtcgacagtggccttgatcagctcgatcggggtcagcatgttggcgtccagcgcggccagccagtcgctgcgctcccagtcgcggaagttgcccggcggcgggccgccggcgttgttgaccaggatgtcgaggtcgcccagcttggccacggcgtccagcgccgccttgcggccttcgggcgtggtgatgtcggtcgccaccgcgatcacgcggcggccatggcgcgcgcgcaggccggccgcggccttctccagcgcctcggcgccgcgcgccacgatcaccacgtcaacaccctcggccgccagcgcgtcggcgcaggcaaagcccaggcccttgctggcgccgcataccagcgcatgcttgccgcgcagtcccagatccatgtctttctccttttgtctgttgtctttggggggccagctccggggccggcccggaatcacgtctttcttgccgacagcaaatacatgccgcccatcaccagcgcgctgccggccagttgcacgccgctgacgggctcgcccagcagccagaaggccaggaacagcgtcgacaccgggccgatcatgcccgcctgcgacgccatcggcgcgccgatgcgcgacaccgccaccatggtcagcgacaccggcagcacggtgcagaacaccgcattgacgagtgacagccacatcaccggagccggctgcgccagttccgccaccggccggcccagtaccaggtactggatcacgcagcaggcggtcgagacgcacatcgcatacgccaccagccgcagcgagccgatacgccgcaccagttcgccgctcaggatcaggtagataccataggtcatggcgctgcccagcaccagcgcgccgcccagccacacctggctgccgctgacgtccaggtcatgcgcgaataccagcacgatgccggcgtaggcgagcagcagcgacagccactggcgcatggcgatcggccggcggaacaccagcgcggtggccagcagcacgaacgacggcgtcaggaacaggatcagccgctccagcccggcggtgatgtattgcaggccgatgaaatcgaggaagctcgacaggtagtagccgataaagccgagaaacacaacgcggccgcgatccgcccacgacagcggcgccagccggcgcgactgccaccagccgatcgccatgaacagcggcaccgcgaacagcatgcgcagcgtgatcaccatcaccgcatcgacgttgtagcggtacatcagcttggcgacgatcgccttggcggagaacagcaccgcgccgacggcggcgatgacaaggcccgagcgctgcggcgacggcagcgcggcaggtgcggcgagagacttctgggaggcgggcacggggaatacaggggaaagcgggcgggcacgtcggccccgcgaaacgacccgacgattgtattcgaaaagacgcaatggcatcgggcatcacctcggcggctccggccaccttcccggccacctttcctgcccccttcctcggtatactctgggtcaccttacccactgcaccaggttcgtgccccagccctccgacccgccttccggcaagaccgccgcagactacgacttcaccgagcaggtgggccacctgctgcggcgcgcctaccagcgccatgtggcgatcttccagcagaccatcccggattcgcagctgactgcggcgcagttcgtggtgctgtgcgcggtcagggaccgccagccgtgttcgatgaacgaggtggtgcgcgccaccgccatcgaccaggccaccgtgcggggcatcatcgaccggctgaagtcgcgtgagctgattgcggtgtcgcacgatcccaatgaccggcgcaaggtggtggtgacggtcacgcccgacgggctggcactgatcgatgagaccgtgccgtttgcgaaggaaatctcggagcagaccttcggcagcctgaatccggccgagcgtgtggcggtgacttacctgctgcgcaagatgagtgagatcgacgaggggaacggcgtctagggtccacggacgccgagggttttctcccctctcccgcttgcgggagaggggagaaaactgtcagctattcatcgccgctagcgccgccagcaccgtctcgggcacgaacggcggccggcgcagccgcacccccagcgcatcgaacaaggcgttggcaagcgccggcgcgcccggcagcgaggccgattcgcccgcgcccagcggcggctccgactggcgcggcatcagcaccacttcaatcggcgggatttccgggaaggtcagcagcggatagctgccccattcgcggctggcgaccccatccgcatcgaagcgcacctgctccttcagcacccggctgagggtctgcaccacgttgccgtggatctggtggcgcacgccgtcgggattgaccatcatgccggtatcctgcccgaccaccaccttctcaatggtgatgcggccgctgccggcatccaccgccaggtccaccacccaggccgaccaggctgcgccgaagcccgggaaacggctgtggatatagcgggcataggccacgccccggccgcgcagccggccttcggcatccgcgatgccccgcgatccggccacgccccgctgccagccagccgcttcagccacggcacgcagcaaggccgcggcacgtacatccggcaggtgccgcaaccggaaatccacgggatcggcacccgcctctgccgccagctcatcgatcacgcactcatgcgcaaacgcattgggcagcgccgacacgccacgcagccaggacgcgcgcacgatcgcgggggtgtcgtcgcaacctatgcggcgcgcgccatacgcgtatggcggcacggcggtgcgatcgcccatctccagcgtgcgcggcgcgttgggcacggcaccggtcagcaccagcgccagcgtgggcgcatcgttggacggatagcggctggtgaagtcatagccaagcagcgcgccgtccggccccagcgtggcgctgacgtccatcagctgggccgcgcccttgggctcccacaggtgttcctgttcgcgcgatagctgcacgcgcacgggccgcccgaccgcgcgcgacagcagtgccgcgtcggcgcagacatcgtcggcgcagttgcgcccgtagcagccggcggcctccatgcgcacgacctcgatacggtcttcgccgagcccgcacagcctcgccaggtcgatgcgcagcacatgcgggttctgcgtgccggaccacaccgtcaggccatcgtcatgccagtcggccacggcgcatgacgggccgatcgagccatgcatctggtacggccagacaaagcgccgctgcaagaccgtgccggcgccgcttgccggcggctccccgtcggacagcaactcgcgccgcgtggccggattggcgcgcagcgcgggctccggatcgtccagcgcgggcagcggcggcaccggcttccagcgcacgcgcagccggcgcgcggcctggaccgcgtattcctcgcgctcggccaccaagccgacaaagtcgccctgcaccaccacatcgaccaggccgggcacgtcgcgcacggagtcgcggtcgacttccagcaggctgttgccgacaaagtcgccgctgtcgcgccccgcatacggcggtcgcaccacgcggccatgcagcatgccgggcacgcgcacgtcgtggacaaaggtcagcgcgccgcgcaccttgccgggaatatcgacgcggcccgcggcgcggccgacgatgcggtaggactcgaccggcttggtcggtatgtcttcggccagcggcagttccaggtgctcgccggcaagcagcgcgccatagccgatgctggcctgcgtgccgggatcgcggaacacgccgtcttctgcctccagcccgccggcctccacgccgagccgctgcgcggcacgcgcccgcagccacgcacgcgcctgtgccgcggcgcggcgcaacggcagcgccgaaatctggatcgatgcgctggcgatagtgggaccctggttgggggtggcttcggtatggccaagcaccatgcgtacgcgttcgagcggcacgtcgagttcttccgccacgatctgcgccagggccgtgcggatgccggtgccgaggtcgacgtggccattgaaggccagcacctcgccgctgtcgcgcacggcaatgaagatgtccggcagcgccggcacgtagtccgaagccgcgccgggctggccaggcgcgggccgcggcgccgcctgcggggcgcgcgtcaccagcagcacgccggtggcctgcagcagcgccagccgcagcgtgcgcggcgtttcggcgtcggcctgtgccgaggattgcaggttggttgccgtcatcgttctgccatctccttcaccggctgcgccccggggcgcccgttatactgcaagccaacagtggaatagcccaagcatcgaccatgacgatcacgaccgcgcccaagccaaccgcaaagcgggcgccagccggcacgcgggccagacaagcgcaggacagccgcgaccgcatcctgaaggctgcgatcaaggtcttcgcccagcgcggctacgacgggggccgcatcgaacgcatctcgtcgctggccaagacctacgaccggatgatctattactacttcggcagcaaggaaaagctgtttgtcgaagtactggagaccatctacctgcagctcaatgaagccgagcagcagctggaacatgagctcgacgccgccgaccccgtgcgcgcgctgtcgcagctgatcgacttcgtctggcagtactacctcgaccatccggagttcgtcgccatcctgaccagcgagaacatgagccagggcaagcacgcgaagaagtcggtgcggctgcgcgagatctccagctacgcgctgtcggtgctcgacggcatcctcgcgcgcggcaaagccgcggggctgttccggcccgacgcgggcgcgcgcgatgtctatatggtgatcgcttcgcttggctacttctacaactccaaccatcatacgctcagcgccttcctgggcgaacccatgatgagcccgcccgcgctggcgcactggcgcgatgtgatccagcagacggtgctgcgcgccgtggccgtgcccggcgcggtgccggatgcggatgtggcgccgccggccgcgccgcgcaagccggcccgcggccggcgcgcggcggcaggctgacgccaggcccggccgcgtcgccacgcctcaggcggcggcgcgcacgccggcaacccgcgccagtgcctcgtcgcgcgtcagcacggtggcgtatttctgcgccatgtcgaacaggttggcgtcatgcggacccagcgcgcggtcgcccacgcaatccgacaccaccagcgggcggaagcccagcgacatcgcgtcaaccacgctggcgcgcacgcagccgctggtgacgcaacccgccaccagcagcgtctgcacgccacgctgcgtcagccaggccgccagcgaggtgccgaagaacgccgacggcaccgtcttgcgcaccaccagttcgcccggcgccggcgccagctccggcacgatcttgctgttgtggccatcctccttcagcgtcagcatgcccggcaccttcagcgtgaagatgttgtggtcgctgtcgtcgtcggcgaacacgatgcggctgtgcgccaccggccagccctgctcgcgcgcggtgcgcagcagcggctgggtattgcggatcgcctcggggatattgccgccgccaaacaccgccgggtcggcgaagccgttgacgaagtcgatgatcagcaggccgtatggggccttcagtggaatcgacgcgccgaagccctgacgctggtaagtctgcacggcgtcatccatggagcgcgtccttgtagagagaagcggccggcgcgtggtggccgtccatcaccttgccgcgcaccaccacgggctcgccatccaggctgacggtgcagtggcgcaccgggatatcgatatggcaggccgtggtgcggctgccgccggcttcgttgttgggaccgaacgagcacaggaagttgccctcgtaggcacgcgcatccatgccgatggtggcctcgcggtcgtacatcgccagcgccgaccagctggcgcgcggctgcaggccccagccgatatgcgacatggcataggcctcggggtcgttgaacgaggccatgtaatcggccagcagttcggcgtccacgcctccctcgatgcggcgcacatagccggcttcgaccgtgatgcggatcggcgcctggatgtaagacttcatcggcagcaggatgtcgccacggtccagcacgatggtgccgttggtgccgccctcgtccggccaggtcagcacgaagccgctcggccagtggtcccagcggccgggctcgtcgacaaagccgtactcgctgatcgccgggaattcgcccaggcggcagcgcaggtccatgccggcgtcggacacgatatgcatctcgcgcgccttgcccagccgcgcggtcgcggccttgacgcgggcacggtcggcctcggtcggcaccagccgtgccagcacttcgggcggttccaccgccagcaggatcctggtgccttgcgccaggatctcgtgctgctcgggcgagaacagcagcgtcatcaggtccagcaccaggtcgctcgccttgagcgcagcgatggcggcgggattgccggtgagcggcgtggtaccgaggtaggccagcgcgtcgcggctgagcgccttttcgccgttgacaggcggcaggtcgagccggttgacgatggcgcccatcgatgccgccgccaccatcgcggtgcgcagcgtctgcggatgcgtggcggcgccggtcagcacggtgacggtctgtcccggctcaagcttcgacagcgtcagcacctgcttccacgccgcggtcaggtcgtaatcgcttacgggcatgttcgctccttgatcagttcagcgccgcacccaggaagtcgccgaaggcgcggtagaagccggcctcgtcgtcccacgggatcatgtggccggcgttggcgacatgcgcaagcagcagcgcgggcagcagcttgcgcatctcctgcacgtcttcctcgcggatcacgtcgccgcggccggcggtcatcagcagagccggcacggcaacgtgcggcaggtcggtgtggatatcgtcctcatggaagccattgaagctggccaggatcgcgcgctcgtcgcaggtatgcagccattgcgcgcgcaggcgcagctggtcctcggtccaggtcgggcagaagcggcgcatgccttccacgtcgatgccctgctgcgccagccggatcgaatcgatgtaccacggcagttgcgacggatacgggcggcggcccggacccgacaccggcggatcgaccagcaccaggcgcgtcaggcctgccggcttgctgcgcgcggcgcggatgccgatgcgcgcgcccatcgaatggccgacgatggcgtagcgctgcaagccaagcgctttggcaaacgcgatcacatcggcagcctgcgcatcgaggctgtagtccagctcagcgccggcctgcgacaggccgcggccacgcacgtcgggcacataggtatcgaactgccgcccgaactgctcgccgacaaagccccaggtcactgccgggctggtgatgcccggcacgatgatgacggcatcgcgctgcgcgcgcgcgccgccctgcccaccatagcgcaggtagtgctggcggatgccgttggcgttcacgttggcgccgtagagaaaggtgctgtctgccatggccgcccccttcagtacgcgcccgacagcagcgcgccggcgcccggcaccaccggctccagcccgagccgcttcagcagcgcataggtggtggcgacggcggcggtaaccaccggcttgccggtcattgcctcgaccttggccacggccggcagcgacggcatctgcacgcacgccgacagcacgatgacatcggcgtcggccgtattcatctgcgcgacgatctccggcagccgcgccgggtcatggcggcccacctcaaggttgtcggggatttccagcgcgcggtagtcgaccacctcatagccttcattgcggatgtagtcgaccaccagctcggtcagcggcttcatatagggtgccaccacggcgatgcgcttcgcgcccatcaccttgagcgcatccaccagcgcgccggcgctggtgatcaccggcgcgtcgccgccgttctcggcggtatgcgcctgcaggcgctgctcggacacgcggtggtagccgtggcccatggccatgatggccaccaggcaggcgtagccgagcacgtcgacgcgggcgtcgctcagttccaccgcgcagcggtcggattcggcgtccatggccgccagctcttccttgaccaccttcttcatccgcatccggcttgagtggaaggtgaagcgttccgggcgcaccagctggcgcgcggccagcatcgccgggatctcggtttccatggtggtgttggagctcggcacgatctggccgattcggaaaactttctgcactgtcgactccgtcatctgtttgtctgtctaccctgcctgcttcgccctggcgggctctgcatgctgcgatttattgtagtgtacacactttatctaggcaaacagaatctgcgccgccacgaattcactcgttcagtgcatacttaactaatcaatccctgtttttgcgcgtaaattcaccgatacagcgcgatgtgcggcgtcttcacgttttcagtaagggttttccataggttcatcaatttcttcttttactttgatattttgagtgtgtacactcgttttcaacggtcggccgagtggccgccccagcccccatcgaccttgtgtcattgccaggagaaagaacgtgcaaggcaaaccgcgaatcgcagttgtcggcgccggactcggagggacggccgcggccgccctgctgcagcgagccggcttccaagtcaggctgtatgaacaggcaccggcgttctcacgcctgggcgcgggcatccatgtggggcccaacgtgatgaagatcatgcggcgcatcggcatcgagaacgcgctcaacgacatgggctgccaccccgactactggtacagccgcgacggcctgagcggcgaggtgatcgcgcagatcccgctgggcgactacgcggagcgccactacggcgccagctacctgactgtgcaccgcggcgacttccacaagttgctgaccgacgccgtggctcccgacacgctgttcttcaacaagaagctggaaagcgtcaccgaccagggcgacgtggtgcaattgcgcttcaccgacggcacggtcgaagaggccgacatcgtgatcggcgcggacggcgtcaactcgcgcatccgcgagacgctgctgggcgccgagccgcccaagtacaccggctacgtggcgcaccgcgcggtgttcccgatctcgcgcgtcaagggcttcacgcatgagcgctgcaccaagtggtggaccgacgaccgccacatgatggtctacttcgataccagcaagctcgacgagatctactacgtcaccggcgtgcccgagcccgactgggacatgagcaagagctgggtcccgagcagcatcgaggaaatgcgcgccgcattcgacggctggcacgagggtgtgcagtcgctgatcgaaggcaccgtcgaagtgaccaagtggccgctgctggagcgcgacccgctgccgttgtggagccggggccgcctggtgctgctcggcgatgcctgccacccgatgaaaccgcacatggcacaaggcgccgcgatggcgatcgaggatgccgcgatgctcacgcgctgcttcaccgagaccggcgtggacgacttcgcctcggcattcgcgctgtatgaagcgaaccgcaacgagcgcgcgagcaaggtccagctggtctcgcacaacaacacctggctgcgcagcaacgagaaccccgactggtgtttcggctacgatgtcttcaacgtgccgctggtgtcggccgggaccgggacgctgtccgcagcggcctgacgcctgaccaaccctgttcgccgcagcccctcatcgaaggggcgcggcgcagcgatgcgtgatgttcaaaccgcccccagccccccgatgaacacgccccgccccctgacgctgcaagtcaatcacgccgagcatacgctgagcgtggcccctgacacgccgctgctctacatcctgcgcaacgacctgtgctgcaacgggcccaagtacggctgcggcctgggccagtgcggcgcctgcacggtgctggtggacggcatgccggcgcgcgcctgcgtgctgccggtcagggccgtggtcgggcacgccgtcaccacgctggaaggactgggcaccgatgcgcagcccgacccggtgcagcaagcgtttatcgacgagcaggccgcgcaatgcggctattgcctgaatggcatgatcatgaccgccaaggcgctgctcgcgcagaatcccgatcccgatgaggcccagatccgcgaggcgctgcgcttcaacctgtgccgctgcggcacccatgtggaaatcgtgcgcgcggtgcaacgtgccgcgatgctgcaacggcagacggccggggggtcggcatcgtgaacgaaggactcgtgccccaggccacccctgcgaccgcggtcgcgggcagcatgccgccgcccgccgccgactgcctggttgcccgggtgctgacaccgcctggcctgcgctggatcgacggcaagccgctggcggcacgcctgctgggcgcgcagcacgaggccgcgctggcgctgccgggcgtgcgcgcggtcgtcatccgcaacaactttgccggcgtggcggcggcttccggcgcacaggccgccaacgcaatccaggcgctgcaggcacgatggtccgccccgccccgcgccgacgacgcaccggtaacgcgccacgcgctggcccggcgcggcaatgccgatgcggtgctggccggcgccgacgcgcgccacacgcagcactaccagtggccgctggccggcacccgcggcgaggcgtattgcacagccgtcgccgactggcgcgacggcaagctgaccgtgtggctgccgagcacgcgccctggcgcgctgcgcgccgagcttgccgcgctgctgggcatcgcgccgcaacaggtggtgctggcctgctggcaatcgcccgatgaccgcgcggacccggcgctgctcgcgccgcacgccgccgccgacgcggcgctgctggcccacgccgccggactgcccgtgatgcgtcggctgtgtgccgccgatgtaggccttgccgatgccgcgctcgatgtgcgcgtcgacaccgcgctggccggcactgccatcgaagcctacgccgcaacgctggcgggcaccgccgccccggccgtaccgctggcgctgtggctgacgcatacggcatcgcccgtggcggacggcatcgatgccgaccatgcaggcgccaccaccatgccgccctatcgcatcccgcatgtcgacctggttgcgacaggcaacgccgccgcgttcgatgccgcgccaccggcggccgcccgggcccaggtgttcgcccgggaatcccatctcgacgagcttgccgccgcctccggcaccgatccggtcgcactgcggctggcgcatctcgacgatgcgcgcggcacggcactggtacggcaagtggccgagcgcgccgcctggacgccggccgcgccccgcgccaacacagcggcaggcaacgtacagcgcggccgcggctttgcctatgcccacaccatcgatcacgaagccgggcagacctggtcggcatgggtggccgaggtcgaggtcgacggcaccaccggcgagctggcggtcacgcgcgtgacggtggggcatgacagtgaatcgctgccgcgcgcgcaagccgcgccgtccgcgcgctcgctggagctggccgtggccgatgctgccctgcagctgacgtcggccacgcccgccttcgacacctggccggccgaggcgccatctgccagccaggcgctgccggccgtgccgggcagcgccctgccggaagtccgcctggccggcacgctcgccccgcatgacgcgctggctgccagcccgaccggcaccatgcccgccgccgcggccgtggccaatgccatctacgatgccaccggcgtgcgcctgcgcgcgccgcccttcagcgccgaccgcatccggctggcgctggccgaggccaggcccggcaaccagcgcagcaagcgcggctggatcgccgcagccgccgcagccgctgccggcgtgtgcgccacgctgatgccctggcgcgcgccgatcgcaccggtggcgccgcccgaggccggcttctactccgccgccacgctcgaacgcggccggctggtggccgccgcgggagactgtgcggtttgccataccgcgccgggcggcgcgaagaacgccggcggcctgccgctggagacgcccttcggcacggtctacagcaccaacatcaccccggatgtgcagaccggcatcggcaactggtccttcgccgcgttcgagcgcgccatgcgcgagggcatccaccgcgacgggcgccgcctgtatcccgcgttcccgtacaccgcattcgcgaagatcagcgacggcgacatgcaggcgctgtatgggtacctgatgtcggcagagccggtgaaagccgaagtcccgcagacgcagctgtcgttccccttcaacctgcgcccgctgctggccggctggaacctgctgttccatcgcaacgagcgctttacaccggacccgtcgcgctccgcgcaatggaatcgcggcgcgtacctggccgaagggctgggccactgcagcgcctgccattcgccgcgcaacgcgctcggcggcgaaaagggcggccgccagtacctgaccggcggcagcgccgaaggctgggaagcgccgccgctgaccgcgctgtcgcaagcaccgctgccctggaccgaagcggcgctgttcacctacctgcgcggcggctatgcgccgcaccatggcgccgcggccggaccgatggcaccggtggtcgaggaactggcgcaactgcctgagtccgacgtgcgcgcgattgcgcactacgtggcctcgttcggcacgccagcgccctcgcctgccgtactggccgcacaggcagcgcagctcgagcagcgcagcgcgcaggccgcgcgcaccctgggcggtcccggcgaacgcctgtaccagagcgcatgcgcggtctgccaccagtcggaccagggcatcgcccagttcggcgtcaagccttcgctggcgctcaatacgaacctgcacagcaagctgccggacaacgtgatccaggtgctgctgcaaggcatgccggcaccgcccaacagcgaactgggggcgatgccggcctatgccgacacgctcgacgaccagcagatcgcgcaactgacgcagtacctgcgcgcgcgctttgcgcccgacaaacccgcatggcaggacctggagaacaccgtcgcgcgcctgcgcgcgatgcctgcccactaggactagcagacccggcggggccggctcaccgcgcctgccgcatccacgctgaccgcacctacgccgtgcctggcaaggcgcttcgccaccgggcagggaacgtgcattcccgcgccggcgccatgcgcgccacgcgcgggaaaaccccgaggagggaaaacgcaattcggccttgcccgccagtttcatgtagcttacgctgaacgatcatgtagtgcgcactacatgagtgccgcgtggctcgcagcggtgccgccccgcacaaggacggcgcgccgcaagcggcagacgagacaacaaaactaaaagattggccctttacatcaccggaagcgctggcccggggcttgcatagtcccccgcagcgccgaccgggaggccgggcctggaccaaccaagggtagacaacaaggagtgactatgtcgtatcagaaccaagcaggtgttgcgagcgtgctaccgggtcagttctagcctcgccaattggagtactcaccacgtttcgttgcaattcggtgcgattgcccggtgtgatcatcacgcattagtcagtaccgtctggccctgcttcgatacgtgtgcgtccgagttcaagaaccagcctataaagacaggtagacaacatgtcgtcatcaatttcatccatggcaacaacgaccatcccggaagtcacgctaggcgcgtccccacagcccagcgcgcggggagcgtcgcctcaaaccatcacgatcgagcaaggcatccgcgcggccggcgtcggccggttccagtatcggctcttcgtcatcttcggcctggtctggctggctgacgcgatgcaggtgctgtcgatcggcttcaccgcgccgtcgattgcggcgacctttggcattcccgtaccgaccgcgctgcagaccgggacgatgttctttgtcggcatgctgatcggcgctttcgtgttcggccggctggctgacaggatcggccgccggcccgtgctgatgatggcggtggtcatcgacgccatctgcggtgtcgcttccgctttcgcaccggacttccagtggctgctgttgctgcgcttcctgaccggcatcggcgtcggcggcacgctgcccgtcgactacaccatgatggccgagttcctgccctcggaccggcgcggtcgctggctggtcctgctggagtcgttctgggccgtcggcacgatcctgctcgccattcttgcgctgatcgccgtgtcgcgaggcaatgatgcctggcggctgatcttcctcgtcacgggcatcccggccctggtcggcgtggtgttccgcttctttgttcccgagtctccgctctacctgaataaatcgggtcgctcggccgaggcgcgcgcggtgctgcagcgtgtcgccaccgccaatcgcgtgtccgttgaaatcggcaacctggagccgcagcctatggagcgcaagtcggtctttgcgctgttcgcgcgcggctgccggcgccgcaccatctgcctgcttgccgcctgggcgcttatttcgatcgcctactacggcgtcttcgtctatctgccggtcaagctggcgggccagggctttggcttcatgcgcggccaggtcttcctgatcgtgctcgcgctggtgcagctccccgggttcgcgctggccgcgcacggcgtcgagcgctggggccgcaagccgaccctgatcggcttcctgctgctcagcgcggcaggctgcatgctctacagcctgggtacgtccaccgcgcttatcgtcggctcgaccctgctgatgagcttctcgctgctcggtacctggggcgccctctacgccttcacgcccgaggtgtacccgactgacctgcgggccagcgggatgggcactgcgggtgcgatggcgcgctttggcggcctgttcgcgccgtccatcattgcaccgatcatggccagccagttcaccctcgccctggcgctgctttcgtcatttcttgccgtggcggcgatcgccatctacatggtggatatcgagtcgaagaaccgcgcgcttgactagcgcaaggcgccgccggacgctcccggcggttcagggagcccgccggcggcgctggcgtgggcgggtcccggaagcgaagccacgggcagggcggcccgcttccattacaatccggctgcaacggcgcggcgcgctggtcgacccgatctcgccgcccgcttcacctgcttgcccctatcccgccgagccctcgccgccagccatgaaacaagacccgcgctttcccaacctgttcatcctcgaccacccgctgatccagcacaagctctcgcacatgcgcgacaaggaaacgtcgacgcgcaccttccgcgaactgctgcgcgagatcacgctgctgatgggctatgagatcacccgcaacctgccgctgaccacgcgccgcatcgagacgccgctggtggagctggacgcgccggtgatcgccggcaagaagctgaccatcgtgccagtgctgcgcgcgggcgtgggcatgagcgacggcctggtcgagctgatcccgtcggcgcgcatcggccatatcggcgtgtaccgcgacgagcagcaccgcccggtggaatacctggtgcggctgcccgacgtggaggaccgcagcttcatcctgtgcgacccgatggtcgccacgggctattcggctgcgcatgccgtggatgtgctcaagcggcgcggcgtgaaggacgaggccatcaccttcgttgcgctggtggcggcgcccgagggcgtggaagtgttccagaaggcgcatccgaacgtgcagctgttcgtggcctcgctcgacagccatctcgacgagcacgcctacatcgtgccgggcctgggcgatgcgggcgaccgcctgttcggcaccaagaactgagtggcgcgcggcgggctggcttgcgcttgaccggcctcaatagtccgcgccacagggctccctacactggcggcaggcgccggcgagacctcgccggcggccatcgccaaagcaaagggagccaagcatggaagccttcaagatcctgttcagtaccagcaccggcctgatgagcctgggcgtgatcgtcttcatcatcggcatggggtggttctttgcgcggatgttcgcgcgcaagatgcgcgaggatgcggcagcggccaaggcgcagcaacaagcgcagcgtcgctaagggaaagggccgcatcgtgcggccctttccgtcattgcgtcagtccgggtctttacttcttcttgcccagcaggctccccagcacgccgcggatcagctcgcgcccgacctgcgagcccaccgtgcgcgcggccgacttggccatcgactccaggatcgaatcgccgcggccggtcttgccggtgcccttggtcagcgtgccgaagatgtcgccggccgtgccgagccagccgctgtcctgctcgcccgctggctgccccgccggcgcgcctccggcgcccttgccgttgccattgccgaccgtcgccacgctgccgcgcagcttttcataggcggattcgcggtccacggtcttctcgtaggtgcccgccaccagcgaaccggcgatcagctgcttgcgctcttcctccgtcgccgggccgatgcggctgcccggtgccagcacccaggcgcgctcggtcacgcagggcgtgcccttggcatccaggaacgacaccagggcctcgcccacgcccagttcgccgatcgcggtttccaggtccagcttggggttggcgcgcatggtggtggccgccaccttgaccgccttctggtcacgcggggtaaaggcgcgcagcgcatgctgcacgcggttgcccagttggcccagcacggtgtcggggatgtcgatcgggttctgcgtgacgaagtacacgcccacgcccttggaacgcaccagccgcaccacctgctcgatcttgtcgagcagcgccttgggcgcatcgttgaacagcaggtgggcctcgtcgaagaagaacaccagcttgggcttgtccaggtcgccggcctcgggcagcttctcgaacagctcggacagcatccacagcaagaaggtcgcgtacagccgcggcgcgttcatcagcttgtcggcggccaggatattgaccacgccctggcccttctcggtctggatgaagtcttccaggttcagcatcggctcaccgaagaagacatccccaccctgcgattccagcgcgatcagcccgcgctggatggcgccgatcgaggcggccgagatattgccgtactcggtggtgaactggccggcgttgtcgccgacgtactgcagcatggcgcgcaggtccttggcatcgagcagcagcaggccattggcgtcggcaatgcggaacaccaggttcagcaccccctgctgggtgtcgttcaactccagcatgcgcgacagcagcagcgggcccatgtgcgagaccgtggcgcgcaccgggtggcccttctcgccgaacacgtcccacagcgtggtcgggcacgcgccccatgccggctccggcaggttcaggtcggccaggcgctgcttgagcttgtcggacggctggccagcctgcgaaatgccggtcaagtcacctttgacgtccgccatgaagaccggcacgcccagtcgcgagaagccctgcgccagggtctgcagcgtgacggtcttgccggtgccggtggcgccggtgatcagcccgtgccggttgcccatctgcggcagcagcaccagttcatgttcggcgttcttggcgatgaggatggggtcggccatgatgttcctggggttttgaggtctggcaccgcgggactcgccacggcagcggcgcgggcaggcccgcgtgataaaatcctgggctgattatagccagccgccaggcatatccgtcacctggcgcgcgctgtccgagggctttgccaccccggccacggcgcgcatggcaaccccgcacaacatcaccgcagatcaccgcattccgcttcggagagaatcatggccggtcactcgaaatgggccaatatcaaacacaagaaggccgccgctgacgccaagcgcggcaagatctggacccgcctgatcaaggaaatcaccgttgccgccaagctcggcggcggcgatgtcgactccaacccgcgcctgcgcctgtcgatcgacaaggccatggacgcgaacatgcccaaggacaacatccagcgcgcgatccagcgcggcgtgggcggcatggaaggcgccaactacgaagaaatccgctacgaaggctacggcctggccggcgcggccatcatcgtcgactgcctgaccgacaaccgcacccgcaccgtggccgaagtgcgccatgcgttctccaagcacggcggcaacatgggcaccgaaggttcggtggcgttcatgttcacccactgcggccagttcctgtatgcccccggcacgccggaagacaagctgatggaagccgcgctcgaagccggcgccgacgacgtcgtcaccaacgacgacggttcgatcgaagtcacctgcccgcccaacgatttctcggcggtcaaggccgcactggaagccgccggcttcaaggcggaggtggccgacgtggtgatgaagccgcagaacgaagtcagctttgccggcgacgacgcggccaagatgcagaaactgctcgacgccctggaaaacctggacgacgtgcaggaagtcttcaccaacgcggtgatcgaagactaagctgcaacaagcccccatcggcggcgccccggacacagcctaggccgccgccttttagtatgtgtttcttttctggcagtgatcatgaaagtattggttgtcggctcgggtggacgtgaacacgcgctggcctggaaattggcccagtcccccaaggtgcaggtggtgtacgtggcgccgggcaacggcgggaccgcgctcgacaagcgcctgcagaatgttccgctgaccgaccccgaggtcatcgccgcctttgccgagcgcgagggcgtggccttcaccgtggttggccccgaggccccgctggccgccggcattgtcgatatcttccgcgccaagggcctgcgcatcttcgggccaacccaggctgccgcgcagctggaatcgtccaaggacttcgccaaggcgttcatggagcgccacggcatcccgaccgccgcttaccagaccttctccgacgccacccaggcgcacgcctacatcgacgcccagggcgctccgatcgtgatcaaggccgacggcctggccgcgggcaagggcgtggtggtggcgatgtcgctggaagaagcgcataccgcggtcgacatgatgctggccgacaacaagctcggcgacgccggcgcgcgcgtggtgatcgaagagttcctggacggcgaggaagccagctttatcgtgctggtcgacggcaagaacgtgctggcgctggccaccagccaggaccacaagcgcctgctggatgccgacgccggccccaacaccggcggcatgggcgcgtattcccccgccccggtagtcacgcccgcgctgcatgcgcgcgcgctgcgcgagatcatcctgccgaccgtgcgcggcatggaaaaggacggcatcccgtacacgggcttcctgtacgccggcctgatgatcgacaaggacggcaacctgaagacgctggaattcaactgccgcatgggcgaccccgaaacccagccgatcctggcgcgcctgaagaccgacctggtcgatgtgatggagcacgccgtcaacggcaagctcgacagcatcgagctggactgggaccgccgcaccgcgctgggcgtggtgatggcggcctacggctatcccgacagcccgcgcaagggcgatgccatcaccggcatcccggccgagaccgacgacagcgtgaccttccacgccggcaccaccctcaaggacggcaccctgctgacctcgggcgggcgcgtgctgtgcgtggtgggcctggccgacaccgtcaaggcagcgcagcgcgccgcctatgccgcggtcgagcagatccgcttcgacggcatgcagtaccggaccgacatcggctaccgcgccatcaagcgctgatccttcccggcaaacgccgttccggccggcatggctgatccgccttgccggccagctttggaccgcgcgacccgccggccgcctcagccggtacaatcgtgacaacgctgtgacgcgcccggcagccgccaaggctgccgggctgccctcagcccggtccatccgctttccgccaaccatgatcgattcccaggcagtccgtgcctatctgctcggtctgcaagaccgcatcaccgatgccatcggtgccatcgacggccagccgttcctgaccgacgcctgggagaaaccgcccaccgaacgcctgcgcggcagcggccgcacccgcatcctggaaggcggcgcggtgatggagcgcgccggcgtgggcttctcgcacgtgagcggcgacaccctgccgccgtcggccaccgccaaccggccggagctggccgggcgcagcttcgaggccatgggcgtgtcgctggtgttccacccgcgcaatccctatgtgcccacggtccatatgaacgtgcgctgcttcctggcgctcaagccgggggccgagccggtatggtggttcggcggcggcatggacctgacgccctactacggcgacgccggcgactgcgcgcacttccaccgcacctgccagcaggcgctggcgccctacggcgacgacctgtacccgcgcttcaagcagtggtgcgacgagtatttcttcctgcgccaccgcaacgaggcgcgcggcgtgggcgggatcttcttcgatgacttctccgcgctgggcttcgagcgcagcttcgccatgatgcagtcggtcggcgacgccttcctggacgcctacctgccgatcctgcaggcgcgcaaggacacgccctacggcgagcgcgagcgcggcttccaggcctaccggcgcgggcgctacgtcgaattcaacctcgtgttcgaccgcggcacgctgttcggcctgcagtcgggcggacgcgccgaatccatcctgatgtcgatgccgccgctggtgacctggcgctatgactggcaaccggaaccggacagccccgaagcggcgctgtacaccgatttcctgccagcgcgcgactgggcctgacgcctgacctatggccaatccagcgcaacaccgcaagcccgccgccgacgcgggagaaccgccgcaaccgtccgcccgcccctatcgcctgggtatcctgggcggcacatttgatcctccccacgtcggccacctggcactggcgcggctgtgcatcgaacaccttgggctggatgagctggtgtggatacccaccggccagtcgtggcaaaaaggcgacgacgtgacccctgccgccgaccgcctggccatgaccgaactggccgccgcggcgcttagcgacagcggcgccagagtccgcgtgagccgcatggaagtggaccgcgccggccccagctacaccatcgacacggtacgccagctgcgcgccgaatacggccccgaagcctcgctgtgctggctgatgggcgccgaccagctgctgcgcctgcacacctggcacggctggcaggcactgttcgaacacgtgcacctgtgcaccgccacgcggccgcgctttgagctggcggcactggagggtccggtgctggcggcactggccgaacgccaggctgacacgcacctgatacaatgcacgccctccggccggatgtggatcgaccagacgctcgccgtcgacctgtcttccacccacctgcgccagcggctggcagccggccagccggcagatgaccaactgccgcccggcgtggcacactacattgccaaccacgggctgtaccgcgacgccccggccagggcatgaccggggttgcaccagtcccggcgcccacccccaaccgatctcagctgaacaagaagacaccatggatattcgtaaactgcaacgcgccatcgtcgacggcctcgaggatgtcaaagcgcaggacatcaaggtgtacgacaccagccacctgactgaactgttcgaccgggtggtgattgccagcgggacatccaaccgccagaccaaggcgctggcagcgtcggtgcgggatacggtgaagggagccggcggccatatcgtggcggtcgagggcctggaaaccggcgaatgggtgctggtcgactgcggcgacgccgtggtccacatcctgcagccgcagttgcgcctgtactacaacctggaagagatctggggcgacaagccggtgcgcatgaagctggccgccggcggccgcggcctggccaaggccagcgagccgatggacgaggacgaggacgaggccccggtgcgcaccgtgcgccgcgccagcaacttgcgccccgcgctggcccgcctgcccgaaggcatgaaggagccgtcgccgccgatgggccatgaggacaccgacgcggacgccatcgccaccatccgcaagccggcccgcaagaccgccaccaagacggcagcgaccaagaccgccggcacccgcgccgcggcgccgcgcaagaccgctgccggcaccaccgcgcgcaagactgcaaccaagaccgcggccaagaaggccccgagcaagaccgctgccagcaagagcgcagcagccaagccggccgcgcgcaagcgcaccacccgctcggcctgagtcccggcgcgcggccgcccggtggccgcgcagcatgacccatcccctgccccatgcaactggtgatcgtggccgtcggccacaagatgcccggctggatcgaaaccggcttcagcgagtacgccaagcgcatgccgcccgagctgcgcatcgaactgcgcgaggtcaagcccgaaacccgctcgtccagcaacaacgccgccaccgtgatgcagcgcgaagccgcgcgcatcgaggcggtgctgggctcgctgtcgaagcaatgccgcatcgtcgcgctggatgagcgcggacgcgacttcaccaccgtgcaactggccgcgcagctgaccgactggcagcgcgagggcggcgacgtggccttcctgatcggcggcgccgacgggctcgaccccgccctgaaagcccgcgccagcaccctgatccggctgtccagcctgaccctgccgcacggcatggtgcgcgtgctgctggccgagcagctgtaccgcgcctggtccgtcacacagaaccacccctatcatcgggcctgatcccggctgtcgccggaaggcccctccgccgcgatgcccgacaccctgcacgactatctttacctcgcctcgcagagcccgcgccgccgcgagctgctgacccagctcggcgtgcgctacgaactgctgctggccgatgacgacgaggatgccgaagcgctcgaggccgtccagcccggcgagacccccgacgactacgtccagcgcgtctgcgcgctgaaggccgaagctgcgctgcgccgtcgcgaacgccgcgcgctgcccgatgcgccggtgctgacctccgacaccacggtctgcctgggcggccgcatcctgggcaaacccgccgacggcgccgatgccgcggccatgctgggcgcgctctcgggcggcacccaccgcgtcctgaccgctgtgacgatcgtgtcgaccacgggcatgcggcatgcgctgtcgatctcagaagtcaccttccgcccgatgcagcccgccgagatcgaacgctacgtcgccagcggcgagccgctcggcaaggccggtgcctacggcatccagggccgggcggccgagttcgtcgagcggatcagtggcagctattcaggtatcatgggcttgcccttgtttgagacggcggcgttacttcgccaggcccgcctgcagttctgagcagcgccctccgtgcccagacaagacccggcccagcgccgggccaccctatacagccgggccaccggcgacgcgtttcacccgctatgactgaagacatcctcgtcaacatcacgccccaagagacccgcgtcgccatcgtgcagcaggccgcggtgcaggaattgcatgtcgaacgcacgctcacgcgcgggctggtcggcaatatctacctgggcaaggtggtgcgcgtgctgcccggcatgcaatcggcctttatcgatatcggcctggagcgcgccgccttcctgcacgtggccgacatctggcatccgcgtgatgccgaccgcaacaattccaccccgcagctggccatcgagaagaccctgttcgaaggccaggcactcatggtgcaggtgatcaaggacccgatcggcaccaagggggcgcgcctgtccacccaggtgagcatcgccgggcgcaccctggtgtacctgccgcaggacccgcatatcggcatctcgcagcgcatcgagggcgaagtggaccgcgaggcgctgcgcagccgcgtgcagggcctggtgcccgacgacgagcgcggcggatttatcgtgcgcaccattgccgaggaagcgaccgacgaagaactcggcaacgatatcgcctacctgcgcaagatctggggcgcgatccgccagaacgccactaccctgcccgcacccaacctgctttaccaggacctgaacctggcccagcgcgtgctgcgcgactttatcaacgacgccaccggcgtgatccagatcgactcgcgcgagaactaccagatgctgctggagttcgccaaggaatacaccccggcggtgctgccgcggctgtcgcactacaccggcgagcgcccgatcttcgacctgttcaatatcgacgccgagatcgagaaggcgctgtcgcgccgggtggacctgaagtcgggcggctacctgatgatcgaccagaccgaggcgatgacgaccatcgacgtcaacaccggcggctacgtgggcgcgcgcaacttcgacgacaccatcttcaagaccaacctggaggcggcccacaccatcgcgcggcagctgcgcctgcgcaacctcggcggcatcatcatcatcgacttcatcgatatggagaacgccgagcaccgcgacgcggtgctgtccgagctgaaacgagcgctcgcacgcgaccgcacccgcatcacggtcaacagcttctcgcaactgggcctggtcgagatgacgcgcaagcgcacgcgcgagtcgctggcgcatgtgctgtgcgagcaatgcccggtctgccacggcaagggccaggtcaagacgccgcgtacggcctgctacgacatcctgcgcgagatcatgcgcgaatcgcgccagttcaacccgcgcgaattccgcatcctggcctcgcaggaagtgatcgacctgttcctggaagaagaaagccagcatctggcgatgcttggcgacttcatcggcaagccgatttcgctgcaggtggaatcgacgttccaccaggaacagtacgacatcatcctcatgtgaagatgccggcgcaggcatggaaaggcccgctcactggcgggcctttccgcattctggccggactagggccggatcacgacttgcggactcaccacgaaggcaggttcgggctggtaatacacagccggcggcggctggtacacgaccggccggtccttgcacttgcgctcttccttgtactcgccgttgtctttccacttgcgcttgatcttgcagttgccgacccagaactcttccttgtagtcgccgcccttgtgccggcgcgcgtagcggtgatcatcatcgtcgtcccagtcgtcatcggcatgggcggcggcggggagggtgccaaggagcacgggcaatacgatgagggcaacaagggcgcggggcttcattttggcggcggcgagcgatggttgagaaaggctagcacgccgtgttccgcatctgtgtatcaagctgtttacgaacgtaactgcgctgcagcgcctgcgcgtgtccgctagcgtccgtctccttacggactcggtgatggtcctactccaattccgtttgccatccgctataactaagccaaggtagtcagcggcatccgcacggatgccgcgcccggcttgccgccccgatgcggggcgcggcccggtcggcaagcaaggagtccggcatgaacgccacgaaccatgggacctgtctgctggcccttctgttgtcggtggcgtgcgcgccattgccgattgtcaagcgcgcccccgcaccgccgcccgaggcgaagggcgaagcaatcgccgccgcgcccaaggagcgcgccaccccgatcgcgaacaagaccatcaacattgccgccgcctgcaagcgcaccgaggaagacggcttccgcgaagacgcgctgatggacgtcaaggccaacgaggtgcgtgcgctcaagtggaagctatgggtatcgcggcgcggcagttgcgaattcaacctggccgagttccgccaggtccgcgcgaccccgcacatcgaactgcaggccatcgacggcagccagtgcaagctgctggtgtggcaggatccgcgccgcgtgacgctggcccataaccgctgcgagaagcactgcacgcccggcatctacgagcaggcgtggccggtgctgttcgacccaaagagcggtgcctgcgccgaggtgcgctgagccgctgcggcattacttcgctttcggcacccggcccatcaggtagaactcgtcgttcgggcgcatgctgacggtgttggccatccggttcgacaagccgaagaacgccgtgatcgcggcaatatcccaggcatcctcctcggaaaaaccgtgctcgcgcagcgcagcaaagtcggcatcgcccacttcatgcgacgccttgcacaccttcatcgcgaagtctagcatcgcgcgctggcgctgcggaatatccgccttcaggtagttcaccgccacctggtccgccaccagtggcttcttctcatagatgcgcaggatcgcgccatgcgccaccacgcagtacaggcactggttggcaccggaagtcgccaccacgatcatctcgcgctcgcccttggtcaggccgccctccttgagcatgagcgcgtcgtggtaggcgaagaacgcgcggaactcgtcgggacggtgcgccagcgccaggaagacgttggggacgaagccggctttttcctggacttccaggatgcgggcgcggatgtcgtcggggaggtcggtcagcgcgggaacggggtagcggctgatggcgaatgccgggtcggacatggtggtctcctgttggataggcgtcatcgatcgtgagcttctgatgcagatactaacggatcggcatgggtgtggcgggcgccatgtcgcccatgcatcgcacggacacatgtcccctgcataaggcatactacgcaccttccgaaccaggcaggcatactgcccaccatactgttcctgatgaaacgtattctcatcgtcaagctgacctctctcggcgacatggtgttcacccagccgctggtcgcggacctgcagcgggcctttcccggcgtcaagatcgactggatcgccgactcatattgcgccgacgtgccgcgctggaatccgaatatcgagcgtgtgatttccgcgccgctgcgcggcttcaagaaatcgcgcaattgggctggcttgcgtgcgatcttcagcgcgctgcgtgaactgcgtcgcgagaagtacgatgcggtgctggacgtccacggcgtctacaagagcgccatcgtgacgttcctggcacgcacgcgcaatcgctatggctaccccgtggcagagttgggcgagagcggcgctcgcttcgcctacaaccatgtgttccagccatttgtcgaagaagattgcgcgcggcagcggatgcgccgcgccgtcagccgcgccctgggctatgagctgaccagggacatggactacggcctggagatgccagcagacacgccggcgccggccgccaagggtccgtacgcgatgctgttccatgccacctcgagcgaggaaaagaagtggccggtcgccgactggatcagcgtgggcagcgcgatctcggcgcgcgggctgcgcgtgctggtgccctggggcaacgacgcggagcgcaaggaagccgaaaccatcgccgccagcgtgcccaacgccgaagtgatgccacgcctgagcatcaccggtgtggcgcagatggtaggcaaggcatcgctggtggttggcatggacaccggcttcgtgcatatcgccgatgcgctgcgccgcccgaccgtgatcctgttcacgaccacgtcgcgccacctgtacggcgtcgatgcgccgggccgcgtggtctcgctgggcggcggcggcgtggtgccgcggcgggatcaggtgctggctgccatcgatgaagtgctgggcgtgcagccgcccgtcacctcgccaaactgagcacgaaggaaacgacaaaggccggcgcaagcgccggcctttgtcgttggcaggtccgttacccttgctgcgtcgcgaactggatccggtgcagcccggcgtacaggccgttggccgcaagcaactgcgcgtgcgtgccctgctccgccacgcgcccgtggtccagcaccgcgatgcggtcagcattctcgatggtggacaaccggtgcgcaatcaccagcgtggtccggcccttcatcagttcctccagcgccgcctggacctggcgctcggactccgaatccagtgccgaagtcgcctcgtccaggatcaggatcggcgcgttcttatacagcgcccgggcaatcgccagccgctggcgctgaccgccggacagcttcatgccgttgtcgccaatattggtgttcaggccctccggcagccccttgaccgtttccgtcaggtaagcggccgccagcgcgcgctcaacgcgggccatgtcgatctcgcggtcggattgcgcgccatatgccacattggcggcgacggtgtcgttgaacagcaccacgtcctggctgacgaaggcaatctggttgcgcaggtccttcagcgacaactcggtcagcggcgtgccatccagcaggatgcgcccgccagtcgggtcgaagaagcgcggcaccaggttgaccagcgtggtcttgccgcttcccgacgggcccaccagcgccaccacttcgcccggactgacgcgcaggtcaatgccctccagcgcggcgcgcgatgcttcaccgtagcggaagccgacttgctcgaaggccagctcgccacgggcacgacccagcatcttgccaccgtcctgcggctcgatcggctcatcgatcagccggaagatcatctcggctgcggtgatgccgcgtgtcagcggctggttgatgtcggtcaggtgcttgagcggcgagatcagcagcagcatcgccatcacaaagccggtaaaaccgcccaccgtggtctggttggcctgcgcctgcaccatcgcaatggtgatgatcaccgacagcgccagcgcggccaggaaggccgtgaccggctggttcaacccgccggcaaccgccatgcgcatcgagtagttcttgagccgctcggccacggtgcggaagcggcccatctcgtaggcctcgccgccgtgcagcttgaccaccttgtagccgcccacggcctcttccacgacataggcagcgttgttggtaaaagcctggtgatcgcggttgagcttgcgcagccggcggttgatcttcgacatcaggtagccgatcaccggcaggatcaccgccacgatcagcgtcaggcgccagttggtatagaacaggtagatcagcagcgcgacaaccgtcagcgagtcccgcaccagcgtgataaagacgctggtcaggatctgcagcacctggttgacctcgaagatcacggcgttgatcagcgaagccgccgtgttgcggtggaagaacgacgccggcgcctgcagcaggcgctcgaacatctgcaggcgcatcttcagcagcacgcggttcgagatcaggttcagcaggtagcccgaggcaaactgcgccacgccgcggatcagggccacgccggtcaggatggcggggacatgccacagcgtgccggcgtagtcgccgccgaagcccttgtcgagcaggtcattgacaaccttggggatcaccccttcgctgcccgcaaccacggccatggcgaggatagcgccgatgaagatgcgtaactcggggcgcaggtaagaccagagccggctggccatgctggacggcacggcggcacctggcgaaatgggcggtttggatgtggtcactgatatttcttgtgtgtggaggcggcgtgccggcccggcgctagcccggccgcttctgccgggctacccgaaggaagggcctgacgatgagctggaacaggaagcgctgatagacgtagcggcgcagataatagccgatgctgcgctgagccttgtcggtggcgtccaggtcggcgcgatgcgtttcgagcgacgaggtctcggccagctcggtcaggccgatgcaatatggcaccaccgcactgaccgacaccaggccctgcttttcgaaggccgaccagtagtcggccgcgcaccacatcggctgcaagcccgccagcagccgtcgcgctgcggcacgcgtcaccacgtagccgtgcgcgcgccaccattcgccgtagcgcctgaccaggcgtcgttcaccgccgagcctgcgggcaccccagcgggtgtacttgtcgacatgggacagcagcactacctcggcccggtccggatccaggcgcgactccaggtcggccagcacggttgccaggtcggggccaggcgaagcatcgtcctccagcaccagcgcaaaggcggcgccgtcgtcgagcatcttgcggtatacaccgaggtggctcaacccgcacccgacctcgccccggctcattggccggtagcgcgcggcggcggccgcggcatcgtacttgctggccacttcctgctccgccagcacgcggccatccacggcccggaacacctggaacgggatgccaaggcccgccagctggccggaaatgcgctcccggcgttcccgcgcggagtcgagattgatgacgtaggcgccgatcatgcggccagcaccagtgtgtccagtcttgcccagattgcagcgggcaactgagagaccaatgctgcacgcgcaggcagaaggaagacttcttccatcccggcggaacggaacaattgtgctcgtatcatcaatttgagtttcagggagcggcccgctagccgactcgatggcatcagggtgcgcggagggcgccatgcgccagtgcggtagaatacgcggtctcgatccagcgcctggcgccgtgggcgactccggcggcccgtcggtcttgtccgacctgcgtgcctcccctatgttccatgagagtctcggccgtcatcattactaggaatgaagctcacaatatcgggccatgcctcgaaagcgtgtcctggtgcgaagaggcgattatagtggattgggccagcacggatgacactgtggcgattgcgcgtgccgccggcgccaccgtcatccagaccgacgactggcctggcttcggcccgcagaagaaccgcgcggttgacgccgccacgggcgactggatcctgagtctcgacgccgacgaacgtgtcacgcccgccctgcgcgacgagatcctgggccatctgaagcggtccgacgcccacgcgcttgcgctgccgcgcctgtcagcgttctgcggcaccttcgtgcgccacgccggctggtacccggactatgtgacccgcgtcttccgcaagggccgcggccgcttcacggatgacctggtccacgaacacctgaaagtggacgacccggtcacccatctgcgcgagccgctgatccattacagctaccgcacattgtcggacgtgctgcgcaagatcgacagctactccagcgcaggcgcgcagcaggcctacgcgcggggcaagcgtagttcggtggcgtccgccgcgggccacggcctgtgggccttcatccggacctacctgctcaagcgcggcttcctggacggcagcgcaggcttcggcgtggcgctgatgaatgcgcaggcaagctactacaagtacgccaagctggcgcagttgcaggccgacaccgatctcaaggcagccgcccctgaggtcacccgttgaggcgccggccgcccctcccctttattccatgcatcgatgaaagttggcatctcctgcaatcgcttcggcgctggcggcggcctggaacgctatgcgctcgacatcagccgggccatggcaggccgcgccggcaccgaggtgtcggtctacgcgcgccgcttcgacgccggcgtggcagagtcggccggcattgtcccgcaccggatcgtggtgtcgtggctgcccggcaagctgcgcgaccgctacttctcgtggcggctgcaagcgcgccgtcccgcggacgaagtgctgatcggctgcaaccgcgtgcgcggctccgatatcgccatctgcggcggcacccatcgcggctatctcggcgcgcgcggcacgacagcgcgccgctccgaccagtggcagatcgacctggagagtgcgcagtatgctggcgcgcaccgcgtggtggcacattcggcgctgatgcgccgcgaggtgatcgagctgtacgggatgccgccggaccgcgtggaactgatctacccgccggtcgacacgcagcgcttcacgccggtcgacgccgacgcgcgcgccgcgttgcgccgtgagttcggtttcggtgacgatgaggtcgtattcctgttcccgtcttcgggccatgcccgcaagggtttcgacctgcttgccgactatttctccaaatcggacctgccgatcacgcttgccgtggccggccgtccggtcgggcgcaccatcccgcgggtacgggaactgggctacagcagccgcatcgacgcgctctaccgcgccgcggacttcaccatcctggcgtcgggctatgaaccgttcggactggtcggcgtggaatcggtgctgtgcggcacaccgctggtctttgccgacaatattgcctgcctggaggtgatccggccgcaggcggtgcatgccttcgcacgcgatcgcgccgagacgctcgaccgcgcgattcacgccgcggtcgacgcggcacgcagcggccagggccggctggcgaatccgatggcgatgctcaactacgatccgggcatcgaggcccacgtcgacgcgctgctagcactggcggccagcgcgcgcgccgcccggcaggcggcctgagaccgccgctgccgtcggcttattcgtagagggtgctgacgctgtccggcgacagtgccagccgcaacgcggtcagcgcctcgtcggagggcaccaccttccagtccgctccgagcatggcctcgcacgaagccgcccccgactggtagtggatgcgcaccggcaaaccctgtccaccgctggcgcgggccaggtgcggcatcagcagttcgcgcagcatcccggtcgaggaattgccattcatcgacaaccgcacggcgctggcaaacttgacgcgtgcggccaccaggtccatcaccgattccgccgtaaacctcaccccaccggtaaacgtctcgtgccgcgcgttccccgtggcgatcagcagctcgtcctcgcggaacatgtgccggttggcgtcgaacagctcgttgaacaccgtcatctcgaccagcccggtgccgtcgtcgagcgtgacgatcaccatcttgccgcgctgcgtcatctgcgtgcggacgccgctgatcacgccggcgatggtcttgccgcgcacgtcgcggccgaaaccgccgccgttgccctgcacttccttttccagcgcggccagcgtgcccttgttgaagcggcgcacctcgtcgcggtaggcatcgaacaggtggcctgagaagtagtagccgagcgcctgcttctcttcctgcagcgtgcgcttgggactccagcgcggctcgtcgagcagctcggggcggtgcgcatcgccggcatcgcccatcaggtcgaacagcgacacctggttggcggactcggccttctgctcggcggcctccatcgcgatcggcaccgaggccagcagctgggcgcggttgtcgttcaggctgtcgaaggcgccggcgcggatcagcgcctcgatggtgcggcgattgacctggcggcggtcgacgcgttcgcagaagtcgaacagatcggtgaacgggcgctcctcgcgtgcgcgcaggatatcttcgatcgcgccctggccgctgcccttgatgccaccaaggccgtagcggatggtcttggggtcggtcggcgcgaagcggtattcgctggcgttgacgtccggcggcagcaccgcgagcttgttgagcttgcagtcctcgtagaggatcttgaccttgtcggtgtcgtccatggcgagcgacatgttggctgccatgaattcggccggatggtgggccttgagccaggcggtgtagtacgccagcagcgcatacgcggccgcgtgcgacttgttgaagccgtagcccgcgaacttctccatcaggtcgaagatatcgtcggcctgctgcgcggagaggccgttcttgtcggcgccttcgcggaacatgacgcgatgctgggccatctcctcgggcttcttcttgcccatggcgcggcgcagcaggtcggcgccgccgagcgagtagccgccgatgatctgcgccatctgcatcacctgctcctggtagaccatgatgccgtaggtctctttcaggacgggttcgacgcgcggatccgggtactccaccttctcgcggccgtgcttgcgcgcgcagaagctggggatcaggtccatcgggcccgggcggtacagtgccaccagcgcgatgatgtcctcgaagcggtcaggcttggcgtccttcagcatgccctgcatgccgcggctttccagctggaacacggcgaccgtgttggcggtcttgaggatatcgaaggcgggaccgtcgtcgagcgggatatggctgcagttccagtcagccttgctggggtcgagacggcggatatagcgctcggcccagtccaggatggtcagcgtggtcaggcccaaaaagtcgaacttgaccaggccggcggcctcgacgtcgtccttgtcgtactggctgaccacgccgctcatgccgtcgttctgcgcgccctgcgtgtacagcgggcagaagtcggtcagccggccgggcgcgatcagcacgccgccggcatgcatgccgacgttgcgggtcatgccttcgacgcgctgtgccagctccagcagctggcgcacttcttcctcgttgctctcgcgctcggtcagcagcggctcttccttcttggcttcctcgatggtgaccagcttgcccggcttgaacgggatcagcttggcgatgccgtcgacaaagccgtagccgagatcgagcacccggcccacgtcgcgcaccgcggcctttgccgccatggtgccgaaggtggcgatctgcgataccgcgtccttgccgtacttctctttcacgtacgtgatcacgcgatcgcggccgtgctggcagaagtcgatgtcgaagtcgggcatcgagacccgttccgggttcaggaaacgctcgaacagcagcgcgtacttgagcggatccaggtcggtaatgccgagcgcatacgcgaccagcgaaccggcgcccgaaccgcggcccggtcccaccggcacgccgttgttcttggcccagttgataaagtccgccacgatcaggaagtagccggggaagcccatcttgatgatggtgccggtctcgaattccagccgtgcgtagtattccgggcgcttggattcgcgcaccgcctcgtcggggaacagcaccgccaggcgcttctccagcccgtccttggccatgtagaccaggtagtcgtccagcgacatgccgtcgggcgtcgggaacagcggcaggcgcggcttgcccagttccagcgtcaggttgcagcggcgcgcgatctcgaccgcgttctccagtgccgaggggatgtcggcgaatagcgcgcacatctcgtcctgggtcttgaagtactggtcggtggtaaagcgccgcgtgcggcgcggattggccagcagctcgccctcggcgatgcacacgcgcgcctcgtgcgcggtgtagtcgtccggcgtcatgaactgcaccggatgcgtggccaccaccggcagttgcagttccgccgccagttgcacggcctgctgcacgtaggcatcggtgccggcattgccggcgcgctgcagttcgatgtagaagcgctgcgcgaataccgtggaccaatgctgtgccgcgcggcgcgcaccgtcggcattgccgttggccagcgccatgccgatatcgccacccattgcgcccgacagggcgatcaggccggtcgcgagcggcaggtcgtcttcgccgggttccaggaaccaggccggatcgatctcggcgcggccgcggtgctggttgcccagccacgcgcgcgacaacagcatgcacaggttcaggtagccgcggcggtcctgcaccagcagcagcaggcgcgacggcttgtcgcggtcttcggcgttggtgagccagacgtcggcaccgaccaccggcttcacgcccttgccgcgcgcctccttgtagtaacggatcagcccgaaggcgttggcgagatccgtcagggcgagcgcgcccatgccgtcggcggcagcggccttgacggcgtcttccaggcggacgatgccgtccacgatggagtattcggaatgcaggcggaggtgtacgaagcggggtgcggacatgggcgacattgtaccggctcgggccgctggcatgcctccgatattgcgtgcgggcggcctggcgcgagggcccggcatagctgatcggagtgcttgggaatgcgcggcggcggcgcccgcacgcgttataatttcacctttccaatcaggcagttatcgcaagccgtcggcgcccttcgggacgcggccgcgcaggcgcagtctcccatgcagatcgtcaatatttccgcttacaaattcgtctcgctggacgacatcgagaccctgcgcccggccatgcgcgagcgctgcgaagcggccggcctgaagggcacgatcctgctcgcgcccgaaggcatcaatatgttcctggccgggccgcgcgcagccatcgacggtttcatggactggctgcacgccgatgcgcgctttgccgatatcgcgcccaaggaaagcctgtcggaaaaccagcccttcaagcgcatgctggtgcgcgccaagaaggaaatcatcaccatgaagatgccgctgatccgccccgaggaaggccgcgcgccgtcagtgcgtccggccgaactgaagcgctggctggaccaggggcacgacgacgaaggccgcccggtggtgatgctggacacgcgcaatgatttcgaagtcgcggttggcacgttcgaagacgccgtggaatatgacatcgccaagttcagcgaatttcccgaggcggtggcggcccacaaggcggagctggaaggcaagaccgtggtgtcgttctgcaccggcggcatccgctgcgagaaggcggcgatccatatgcaggaagtcggcgtcgagcgcgtgtaccagctcgagggcggcatcctgaagtacttcgaggaagtcggcggcagccattatcgcggcgactgcttcgtctttgactaccgcaccgcgctgaaccccaacctggagccagccggccccaagcagtgctttgcctgccgcgcggtggtcacgccgcaggagcagcaaagcccgcactacgtggtcggcaagagctgcccccactgcatcggcagcaaggaccaggccgcagcgtaagaagccggcggctcaggcggccagcaggtggtaaagattgcgcagcatgcccgcggtggcgccccagataaagcggtggccgccagtctcgcgcggatagggcatggcgtagaacacccgctcgccgtcgacccagcggaacagccgccgttcgtggtgggatgggtccatcagaaacgcgagcggcacctcgaagacatcggcaacctccgaggcatccgggcgcagcgtgaaaccgtcgcgcaccagccctaccacggggctcacgtggaaaccggtgccggtaatgtagtccggcagcgcacccagcacttcgacatagtcgcgcgccagccccacctcttcttccgtctcgcgcagcgcggtgtcgatacggttgacatcccatgactcctgccgcccgcccgggaagctgatctgcccggcatgcgcgctcaggttggcattgcgctgcgtcagcagcaccgtcaggccgtcatggcgctccaccagcggcaccagcacggcggcgtcgcgcagtccgcggctgcggtcatagacgcgcgattcatcggtcagctccggcgcccaggccggcggcacccggaagcggtgccggataaagtccacctcaagccgcggcgcgctcagggcgccgttgcgcaggtcggtgtcgatgacggggagggattcgggatcgaaagcaggacgcataacatcgcaagtatgacagaagcgcgcattctggcgctgcagcaaaaagcgcctgccgcttccatcgttgcgccgcgccaatgcaaaaagggcaccctggggtgcccttcctgaggaaacgctggccgggctgccccggccggcatgcccagcttactgcgcagccttggcagcgacagcagccttcgacaccagcttttccttgatacgtgcggacttgcccgaacgctggcgcaggtagtacagcttcgcgcgacgcacgtcgccgcgacgcttcacttcgatggcagcgatcagcggcgagtacagctggaacgtacgttccacgccttcacccgacgagatcttgcgcacgatgaaggacgaattcaggccgcggttgcgcttggcaatcacgacgccttcgtaggcctgcacgcgcttgcggttaccttccaccacgttcacgctgacaaccacggtgtcgccaggcgcgaatgcggggatggtcttgttcgcggtcagacgcgcgatctcttccttctcgatctgctcgatgatgttcatcgtttttctccgtagccatcgtgccggcgttgtatgccccaggcattgcccgggccccggcagaggatggggttttacctggcgggggtctccccccgcccttccttcgccgcccattccgacaagaacttctcgtcggcccgggtcagcaaaccttgtttgcgagcggcctcgatcagatcgggacgcttgctcgcggtattggccagcgcctgctggcgccgccatttctcgatctcggcgtgatggcccccgagcaggatctcgggcacccgcacgccttcatattcttccggccgcgtgtagtgcggacaatccagcaggccgttgacaaagctgtcctgcacggccgactgcgcatcgcccagcacgcccggcagatgccgcaccacggcgtcgatcagcgccatcgccggcagttcgccgcccgacagcacaaagtcgccgaggctgatttcctcgtccacgcggcggtcgatcagccgctggtcgatggcctcataccggccgcacagcaaaaccaggcccggccgttcggccagttccatcaccttggcatgcgacagcgtcttgccctgcggcgacatcagcaccacatgcggctctggcacgccggcctgcgcctgagccgccaccgcggcatcgatcgcgtcatccagcggcttggccagcatcaccatgccggggccgccgccgtaaggacgatcgtcgatggtgcggtagttgtcgaccgtgaaatcccgcggattccaggtacgcaagccatagcgctgctgctttgccgcccggctggtgataccccagtcggtcagcgcgcgaaacatgtcgggaaacagcgtgatcacatcgaactgcatccgctctctcccttccgaaccccgcaccgcgaaggcacgggttcagtaatcgagcccccagtcgaccacgatgcgcttgcccgcggtatcgaccgagcgcaggaacgcatcgacaaacgggatcagccgttcaccggccttgccgtcagggagcacgcaggccacctgcaggatctggtgggcaccgttgtcgatcagcccggacacctcgcccagcaactcgccttgctcgttgctgacggtgcagccgatcaggtcgacccagtagaactcatcttcttccggcgcgggaaaatccgcacgccggatccacacgcgacggcccttgagcgcttccgcaagattgcggtcggccacgccggacgcttgcgccacgacggtgccgctgtgctcgcgcgactgcgcgatcttcacgcagacgggctgggcacgcgacgcatcggccgccaccagccccgcctgcggcggtgccagcagccaccagcggcgggcatgcagcagggccgaagcatcatcggcatgcggcaagaccttgatccagccgcggatgccgtaggcagcgccaatatagccgacctccaccaggtcttccggcagggggtcggcatacaggagcgccgcgggcagtttgcaagccttttgcggctcgccctggggctgaaccagcggtcggttcagcggccgggcggcgccctgctttcgttcagtcacgtgtgcaataagaacgcgcccggccggccgcaaaaacggctcgacggggcgcgctgcaggcgactatcaggcagcagccttggcggcgccttgcttgaccaggcgggcaacggtcggcgacagctgagcgccaacaccttgccagtaggccaggcggtcttgcgccaggcgcaggccttcttcaccttccgtagccagcgggttgtagaaaccaacgcgctcaatgaaacgaccatcgcgacggttgcgcgagtcggtggcgacgatgttgaagaacgggcgcttcttgctgccgccgcgagccagacggataacgaccatggaatgattcctcagaaaacggggtgttcgaggacgttcgaacacgaaacgcaagagtatagcccaattaccgaggccaaacaaacacttaggtgattgacgcgcgcctgccgtgcaggcatcgtggcaaaaaccgcgacaggaggcccgacatgcgccccgttctgcacttcatggcccgcaccttacggcctgcttccctgctcgccattgtactgctggcaggcaccgggtccgcgccggccgccctgccgctggaccaggtccggctgccgcctggtttccgcatcgaggtgctgacgcaggacgtgccgggtgcacgcgccatggcgatgtcgccgtcgggcacgctcttcgtcggctcgcgcagcgaaggcaaggtctacgcggtgaccgacgcgctgggggcccggccgcgcgtgcgcacggtcgccaccgggctgcgcatgccggtcggcgtggcgttgcacgacggcagcctgtacgcatcctcggtgtcgaagatcgtgcggatcgaccatatcgaggccagcctcgaccagccgccggcaccagcggtggtgagcgaccgcttcccgacggacgggcatcacggctggaaattcatcgccttcggccccgacggctacctctacgtgccggtcggcgcgccatgcaatatctgcgcgccggacgagaaccgctacgccaacatcatgaagatgaagcccgacggcagcgacctgcaggtggtggcacgcggcgtgcgcaacaccgtcggcttcgactggcacccggccacgcgcgagctgtggttcaccgacaacgggcgcgaccgcatgggcgacgacgttcccgacgacgagctcaaccgcgccaccgctgccggccagcatttcggctacccttactgccatgccggcacggttgccgatcccgaatacggcagccagcgcccctgcgccgagttcgtgccaccggtggcccgcctgggtgcgcacgtcgcggccctgggcatgcgcttctacaccggcacgcaattcccggcggcctaccgccacaacgtcttcattgccgagcacggcagctgggaccgcagcgagccgtccggctaccgcgtggtccgcgtggcgctggacgatgccggcaaggcggtgcgccaggaggtgttcgcgcagggctggctgcgcggcggcaggccgtggggccgcccggtcgatgtcctggttgcgccggacggttcgctgctggtcagcgacgaccttgccggggccatttaccgcatccgctaccgaccctgaatcccgctgaaaaccccacggaacgggggtcttggtggccgaaacaatccgttacaccggtaacgggattggcataggcgccccgatggcccatgcgtaccatgaacccatcttccaacagcaacacagtgcgtcaggaacctgggaatccgcatgctcacccgctctctcctgcgcgacctggtggctggcatcctggtggcctcgggcctggtcggcgcggttgccaccagccatgcccaggtcgcgttctggcaacaagtacggcccgatagccggtccgcacggatgcagccgcagccccgcgacggctggcagatggccagcgtgcgcgccgagagccgcgagcacgtgcaagcccagatcgaccgcatggaagcacgtgcccgtgccgacgaccgcctgagcgggcgccgcgccgcgctggctggtgcccgcgacgacaaccgcggccgcggccaggaacgcgacaatcccaatgaagcccgcaacgactcccggccaggcaacgtcggccccggctggcaggcacgtggccgcgacaatggccgataacggtcgctgctgacggctgtcggcgcaaccccgcctattgccgcacggcccaacggtctttcggctggtcgcggaactccttccccgctctccctgtctctatttaagtgtgtgccccgctttccgggtgccacgcacaggctgccgcccggcgctgtccggggctcacagcgtgccgtccagtgcagacggcaatcgaactgacctgcctctgcccgacacctcctgccggacccgatcaagacggcacgggcgcagcctccagaaagacaataacaataattctgtgaggtttatcatgccatcccttcttagcgacctggccgaacatgccggccagttatcgctgtcgatcctgttcatgggcatcctgaccctggtcctctacggcgaaacacatatcagcgagcacgcggtggccttcctggacggcctgcagtcaggctggcattagcgccgtcctgcgcgtcttctgacgcacttccctttcttgcgctgactgccggcgtacaatgtgggccggccggtacccatgtgccgccgttcctgtgccggtgcattgccggcccgcaaccgccggaaatccgaccatgcctgcagccacgccagcccgccattcctcgacgctcgcctcgccgcccgcccgcggcaaatcgaagctgctgacggtggcgctggcgttcctgtgcggcagcctgggcgcgcatcgcttctacctgggcggcctgcgcgatccgtatggctgggtgcacctgctggcgctgctggcaggcgcgatcggcgtggcctcgatggcgaccggcgcgggcagcccggcgctgaactggaccttcgccgtcgccggcggagcctctgtcatcagcgccttcctggcggccatcgtctacgggctgcgcccggacgacaaatgggacgcgcgcttcaaccaactcggcaagcctacacgctccggctggccggtagtgatcctggtgatcctgtcgctgctgatcggcaccggcctgctgatggccgggctggcaatcagtttccagaccttcttcgaatcgcaggtcgaggccgcccgcgcgttgtcgcaatagctgccgcggcgacattggcgccgtgcatttcgacctgctcgacattgccgtcttcgtccgcgccgcggcgctgggcaatctgtcggccgccgcgcgcaacctgggcttgtccacctccagcgccagcgcccgcctgggccggctggaacagtcgctgggcagccgcctgctgcatcgcaccacccggcggctggcactcaccgccgacggcgagcgcttcctgccacatgcggagcagttgcttgccaccgcggctcttgccagcgcatcggtcggcaccagcgccgagcgcccgcgcgggcagttgcgcgtgaccgcgccggcgtccttcgggcgccagcatgtctcgccggcgctgcccgaattccttgccgcctaccccgatatcgcgcttgacctgcgcctgaccgaccaggtgatcggactggtcgatgccagcatcgacgtggcgctgcgcatgggcgtgctgccggattccacgctggtggcacgcgcgctcgcacccagccaccgcgtgatctgcgcctcacccgcctacctgcagcgccacggcgtgccgcgccacccggacgacctgcgccagcacaactgcctggtgctggccgaccagtcggcgtggcgcttcaatacgccgctgggcgagaccgtggtgcacgtgcgcggcaacctgcgcgtggataacggcgaagtgctgcgtgatgcggtggtggccggcgtcggcatctcgctcaagtcgacctgggatgtgggcccgctgttgcgcagcggcgcgctcgtgacagtactggacgaatacccggtggtgccggcagtgtcgatctgggcagtgtttcccagccggcacctggtaccgcccaagacacgcgccttcgtggatttcttcgccgagcgcttcggcaacccgccctattgggaccggcccgatacctagagcgcactgcgcgcttgcgcacgatcaaggccggcgcaaacggcggctctcctttccgccaattcgcccatactgttagagccgaccgattccggcggcgtcacgcgcggcggggccacaccctggcgcaaaggagcaagcatcgacatgccaacctatgaggaaggacgcctggcggcgatcgctgtcaggctggcgctgtcctcgggactgccgccatcgagcgcgaaggccgcgctggaactcgccagcagcatgatcggcgaccagcaggccaccgaacgcgcccggaagactcagaacagcgaaccctgcggatcgtccttgccgcggggccccctgactggcgggcggaaacgcgacgtatccagctcgaaccggttgtaacgaaaccctagccgttcggcggccttgtagaaacgctggcgcagcaagtccgcccacacgcccgtaccgcgcatgcgcgaggcaaagctggcatcgtaggctttgccctcgcgcatgtcgcgcacgcggttcatcacccgttccgcgcgctcgggaaaatgcgccagcagccattcctcgaacagaggccgcacttcccagggcagccgcagcacgatgtagtttgcatagacggcgcccgcttcgtgcgccgcttccaatacacgctccaggtcgggttcggtgatgaacgggatcaccggggcgatgctcacacccaccgggatgccggcgtcggtcagcgtgcggatggtgcgcagccggcgtgacggcgtggccgcgcgcggctccagcgtgcgcgcgatgccagcatccagcgtggtgatggtgaccgccgccaccgccagccgcttcgccgccatcggcgcgagcaggtcgatatcgcgctcgatcagagacgacttggtaatcagcgccaccgggtggtcgcactcgttcagcacctccagcacgccgcgcgtgatgcgctgttcgcgctcgatcggctggtaggcgtcggtgttgacgcccagcgcgatggtctcgcagcggtaagacggccgtgccagcgcctcgcgcaaccgctcggcggcgttggctttggcataaagctgcgtttcaaagtccagccctggcgacaggtccaggtaggcgtgcgtcggccgggcgaagcagtagatgcagccgtgttttatggtccgtcattttgttcacgttagttggtaactccctgtgccatcaacctctctgggtattttttccgtgcgatggtgggggggcgcgaacattgtttttcacggccaaatactgtatatatatacagtgcatcaagacttaagagaggcgctgatgacatcacttcgcccgggacttcgcaagggccgaggcgcgctgtccaacattgaatccaggttcgacaattgggacagagcgcacgacgacgatgcacttgcagccattttagagctcgagggtgaacgccccgcgcccaaaacaactgtagcatttgaggatgcaaaatcaatcatctcgagaaaccaatcgccagatgtcccatttgaccagtcgattaatgcataccggggatgtgaacatggttgctcgtactgttttgcccggcctacgcatgcatatttaggcctttcccccggccttgattttgagaccaagcttactgcgaagccaaatgctgctgtgttactcgagaaagagctttcaaaacgtacctatatacctagcgtaattgccctcggtaccaatactgacccataccagcctattgagcgagaacaccagctgactcgcagaatcctcgaggtgctcgaggctttcaatcatccggtagcgattactaccaagtcgcatctcgtgacacgcgacatcgacatcctctcgcggatggcggagaagggtctcgctcgcgtctatctctccgtcaccacgctggatgcggagcttgctaggaggatggagccgcgtgccagcaccccatctaggcgagtggacgctattcgcatgctgactgctgccgggatacccaccggtgtattggccgcgcctatgattcccgcgcttaacgattatgaactggagaatatcctaagcgcaactgcaaatgccggtgcgtccgctgccgcttatgtgttgctcagattaccgctggaggtgcacgacatcttcatcgaatggctcgagcaacactaccccggacggaagaatcatgtcctgagcattattgaaagcatgagagacggcaagcattatgacgccgaattcgggcgcagaatgcgcggcacgggcatattctcagagctgattgccaaacgattcgagcttgcatgcaatcggctcggcctcaatcaggaacgcagaaaactgcgtaccgacctattccaggcacccattaatccttcgccccagggaagcttattctgaggcagtcaggaatacttgaggtgacttcgccagccataaactcgcggctgccaccacaggtgtttgccgaggcggactggaggcgctctcgaaccgcaaaagtgaggtgcgctagccgccggcttgtgcaaacccaaaacgacggtaggccatcagccaggctgtggataagctgttattaacatgtggatagtctgtggatagtgcgtttggcacgggcgccatgcgattgatggggcgaaccatggaggtctaggagtcctactaggtagtcaccaaccgaacgagttcgccccaagaaatcgcggacgtccacgtgaacccaccgtcgcgaaaacgcaacagttcccaaagtgcttcgcccggctcaaccgcgaccatgtcgctagagtggacccgcatgcagccttccagaaggtcatatacccgtaaaggacttgcgcatgtgcaccacaaaccacgagcacattgtccaatatcacccacgtaccaaccgtaatctgccatgactgcccattgcccggaatgctacggcgaacgcgaatgtagtgtccatggagaggtcaaagtaccgtgggaatggacggatggaccgcatagcgtcaacggccagacggatcatcgactactgcagtgcttgggttgcaagaccgtgctctactggtccagcagttggaattccgaagattggggatggccgcactggtgccgacggcaaggagcaaatctatcacccgcgtaccgtcacgactttccctacaccgcagcgcgtcagccggcgtcctgaatggctcgccaagatcgagcagatcgacgcccatctctcgcagatcttgcaccagacctacatcgccctggaagcggatgcgttcattctagcgtcggtgggcttgcgtaccgcctttgaccggactaccgagatcctgaaactcgatcccggacacacgctggaacagaaggtcgccctgcttaaggacaagggctacatcggggaaactgaggcggcaattctgtcagtggttaccgatgcgggcaatgcggccgcccatcgcgggtggtcccctggggctgcggaattccgggtcttgcttatcgcattggagcagttcatcgaacgcacggtgattcagggcaccactgccctaggcatcgcccagcacatcccaccgcggcacccgcgcccgaagcgtgcattctcgggggcaaagtaagcgtaattatgttgccccgcctgccgcgaaaaatgccgacgcattcagcctgcctggcgccgtccgccccgccgtgggtttccccgcgcggcgcgccaccttccccagggctccccgcaaatggaggatcgcctagccgcgcaatgtcgggtagcattcgccgtgacgtgaaagccccgcaaggggcattgatccctctgcccatgttttcgtacgcctgcagccaaacggccgcccagcacccgctcgcctctttccgcacgcccgtcgacgggccggagctggagatcgtgcggttgttctgcgagacgctgcccgcccgtgcaccgcgcaaccgcgccacgaccgtatttcttgaacccaggatcgcgggctgctttcccgatgtggtcatcgtgcagtgggatcccgccattgcggcggcctgggtgcctgcgcgggagcacctggaaagcggcgatacgttctggctgcactacctgcatcaggtcggcaccctcgatcccaccgtcctgtgcgagcgactgggcaggaaacgcggcctgcagacatgggaacgcctgcttgccgcagaggtgggccggcaggccggggaccggttgcggcgcaagccactggccgagacctatgcgatcaagcgcctcgtggctgtggaggccaagatcggcaactggcgccgcggcctggagcaggccttccagaacacgtggttcgcctccgagtcattcctgctgctcgatcggcttgagggcaaggatgacctgtttctccgcgccgccgacctaggtatcggcctgatcgagccggcccacggcatcgacgacagccggctgcccgcccgatgcggcaagcatccggtctcccaggcgtcctgactcttcaacgagtgcgtgcggcgcgacggtccaaacacggcgagccgacactagatgcacgcgcccctgaccgatctgcctgcggaattccagcgtttccagaatctgcatttcattgcctcggggggacagaagatcgtctttcgcggcacgtgcccgcagcatggcgccatcgtcctgaaagtgttcaatccgggaaccgacatggcgcggttcgaacgcgaactgagcgcggtacagcgcatccagtgccccctgacgcccaccatcctggaatcgggcatgacccggcaaggcggccaaccgatcccgtacgtggtcgagtcgttcatccccggcgcatcgattcagcagcacctggacgccggcagcctgcaggacccgaatgtcgtccgactggcgaccgacatcctccaggtgctcaccctgaccgagcaacgcggtatcgtgcatcgcgacatcaagcctgccaacctgctcctccatgccgacacgggggcgatctggctgctggactttggcatcgcgcgccatcttgaccggaccgccctcaccgtgggccccatcggtccctgtaccgccggattcgcgccaccggagcagttcaacgcgctcgcggccgaagtcgacgtgcgcagcgacctgttcgccttgggcgtcacccttcatacctgcatcgaaggccgcaacttctattgcgagggcgcacgagaccacgtggaggtcttccagcgtgtgcaaagcgttcccttaccgcggctcacgcgcgagccttgcggtgtcgcgggattcgccgacctggtgatggcgctcacgcagatacggcgcagccatcggccgcactcggccgccgaggcacgtgactggctcgcagaactgttggtccaataccaagcatgagacaaccgcccgcccgcgccaacggttttcgggacggggagattctgacagggggacattgcggtggaactgcatctgcaaatggggcacggcatgatggaccattgccgcgtgctggtcggcgcatggcggggcggcaccgtcgtgctgagtccgcgcgatctggacatgcagcaaatggtccgcctgtcggaggatctggcgagagatggcggacgggtcctgcttgacccgcagatgttcctgccgcaggccagccacccacggctggtcggccatgcgcactgggcgcagggcggcaacctgcaacaacctgccaccgtggcgcacatcatggaacgcctgatcgacatgaatgcggcatgcggcgcgcagcagatcatcctgcctggcgccctggccgcaaaggtcgacgccgcctggctggatgccatggcgcaggtcggcgaatgcgcccagcgcctgggcgtcgacagtgcccgcgccatgcagaccattgcgctgagctatgacgctgttcgcgatgacaagcaggtggaagccgttgtcgaggccatggacgcctggcccgcgcgcaccatctatctaatcgccgaagccccgtcgggggtctatctggtgaacgatccgacatggttcgccaatattctggacatcgtcgccagcgcccgcttgagcggaaaacaggtcatgctcggctatgccaatcagcaactgctggtggccgcctgcgcaggcgcgaatgccatcagttcggggacctggatgaacgtccgtatcttcatgcaaaatcgcttccttgccgctgacgaggaagaccggaagacgcgctccacctggtactacgcccccaatctgttctcggagtacaggatccagaatctggatattgcccaaaagctgggcttgctcgaccatctgcgcacaccggacgattttggcagcgggcatgcagacgtcctgttctcctcgctccagccgacgctggcgggctttgccgaacccagttcgttccggcatttcctgcagtgcctgcggacgcaagcccgcgcggcctcgctgggttcattcgagagcacgctatccagttaccgccaggcgctcgacgccgcccaagcagtgctcgagcgcctggataaaaagtccgtctcaagcaagcaacgcaacatcctggccagcgaatgcatcgatgccgtccgcgctggcctgcatgtcctcgaacggaaccacggccctcgcctgcgcaggctttggggaagactgtcatagccagcgcgacccgcttgtccatgcgcagcggttgacctaagcgcgcgtccccgatgacgcggtggtggtcaaacgccaccgcccccctgacctacctggcgacgcgcggcttgccgatcgcccggctccgccgccgacgccctttgcccggcgcccgacacagcccaagtcatgacgagttcgaaatatcagtttctggcgcccacggtggcgctcctttccgacaaggtcgtactggcccaggcctggaagaaaacgcacacctatatccgcaaacataactggtttgccgacacgctcgaactcgacacgtcggcggtcgatcttgagcaaaccttggaacagtgggcgcaaacgctgcgcacaggccaatatcttaaccaggcggccaggatggttcccgcacccaaaagcggccgctgggtcatcggcaccgtgccccagcggccagagcctggctggtatcccgtggtcgaccccggtgaagcgcccgttctccggccactcgcgcatcttcccgtccgggagcagaccgtggccagtgccctcatgctctgtcttgcggattgcatcgaaacgctccaggggcccaccatcgggcatgccgacttcgccgaggcgcagcgcatgggcgtgtacagctatggaaaccgcctgctgtgttcctggaccgagctcctgccggggacgaaacatgcccggtttcgttggggcaactccgacatctacacgcgatacttcaccgactatcagcgattcatcgaccggcccaagtactttgccgaacaggcgcgcgacaagggtggcaccgtgctgctcgtcaagctggatctgtccgctttctacgacaacatcgacgttggacgactaatcgagtccctgcggcgacactatgcgaagttttgcgaaacatttcctgattatcccaagcacgacgaggatttcctcgcggtggcgcgcgaagccctgacgctgcgctgggatcctcaggactcgacctatgcgcccctgctacgcgaccgcgctctacccagaggtctggcgcagggtctggccgccagcggcttctttgccaacgcctacctgatcgacttcgacaaggaaattggacgtcagctcaacaccgcgattcacttcgaaggagacgagttcactctggtggactactgtcggtacgtcgatgatctgcgtatcgtcgtctcggtcgacgccaggctgccgcacacacacatccctggcgtgattacccaatgggtccagcgtatcctggacgtgacggtgaacgagcatgtcgaggacgaccgcaacgttctgaaactgaacgcacgcaagaccgagcacgaagagttcgcggccgtcagcgcggaaagtggcgatgtggcggccatgcgcctgctgcagcaaagcctgagtggcccgtttgatctggaatcgctccaacagacctcggcgggcctgaacggccttctcgcactggccgaactcagccgcgaggccgagacaagcgctccctcgtcttcgcccttgtccctcatcgaacggcccaagctacaggtcaaggacgatacgctgacgcggtttgcagcgtttcgccttgtcaaaagcctgcgactgaagatgagctttctgggcgaggaggcggccggtgtcgcgcacgaatgcgaagccgtcgcgcgtcgcctcgcggccgcctgggtcacgaatcccgccctggtgcaagtgcttcgctacgcgttcgggatctacccggccgccgacatcctgctcccggtactcgaagcgctgcgcgacaagctcgactgcccggtcgcgttcgagcgcctcgtggcccaatacgtgcttgccgaactcttccggtccggggccaccgagattggctgggatagcgatgccgggcccgggccggatgtcgagcacttccgggacgcgctggcggccaccgcacatcaactgctgaatcgacgcgattccccgtggtacctccagcaacaagcctcgctcttcctgacggtaactggtcggccgcttgcgccgcccgaaggaacgcccgagctgcatcgtcacgcgatcgttgccggactggtacagggccatcccggcccggcacagaccctcccggccggcgacttcgttgccctcagctatgtcgcctaccagatcacggggtcgcaagcgaatttcaagcgcgggatccaggcctggtccaaggggcgaaatcaggaagcgctgcggctggcgcgcgagctgttgcgtcagaccgatagcgaactgtacgactactgcttcgcgcgcccaccacgcccaaggcaacgcacaccagccgatatcaccggtgctggagaccacacgcgcccttcgggtccccctctgcgcaacagcgtctggctgcctttgcaggtggtcttctgccgcgctcacaatccgctccgccaggagaatgcgctgctgaagctggcgcttggcctggtgcgctgtatgcggaaagccgatacgcccgaacaactgcgaccggacttcattcaggtccgctgtgccgattgggacagactatcccatccgcacgttcaccttgaagtcagcccctcgttgcggaaatcgcgcgaaaccctgaacgcgctctataccacgccagaatggtgtgagggatttgcggcgtggacctacgcactgggccgcgtgctacgcgccgccgccctaggcaacgtcgacttcaccagtcgccgctatgtgctcgccggggagccaagcccttacacaggcattcgctcgacctggcagaaacgccgcttcggcatgcatcatgcgtccggctcgattaccggccacgacgcctccgtcaccccatggttcagcgaactgctgttgcagctcctgcgatggcccggcctcgaagtcgagagtccactgatcccgcaggctgccgctatcgagtccttcgacatactggaaacgatactctatgaacggttacaggggcagaacgccattttcggacgcagctccatggtgccagtctatcgctttccggttcagttccccttgcggcgcgagtctcgccttcgcgtcgtggtggtacagggtctgctgccgcaagcttcgcacttcacggagtttggtaagtgtctggacggtagcgactacagagcctggcatcggcaacacctcggccttttgagtgtcctgatcaaccggcacgtacgtacgctcgctcacgcaaaagcagaacctggcgaggaagcggaggggcggcctttcgtggacctcatcgtgttccccgagctttccgttcatgtcgaggatttcgatctgctacgtgccctgtcggacgcaacgggcgccatcatctatgccggcatggtaggagagctgtcgccaataacgagggcaccgatcaatgttgccaagtggatcatccctcagcgacgggaaacgggccggtcattcctcgtcatcaaccagggcaagtttcatcttacaaaggacgagcgggagataggaatggagtcatggcggccgtatcaggctatcatcgagctccgcagcgggagtcgcacctacgccatcagcggcgccatctgctatgacgccacggacatcgccctcgctgccgacttgcgcgaccagtcccacatgttcgtggtcgccgccatgaacaaggacatcaagacgttcgatggcatgattagcgcgctccgcttccacatgtatcagcatgtggtactcgcgaatagcggtgaatatggaggctccacgacccaggccccctactccaaggagcaccatcgcgtcgtgagtcacatgcatggcggccagcagatcgggatcagcgttttcgaggtcgagacggacgactttggtccgggtggcaaggccttcccgagctccggaacagggaatggcaagacgccaccggcgggactgcggcgagttccatggggcaccacttaaacgaagcgtgcctcaatccgtgcgctggaccaacgtcgcagcaggaactcgcgggttcctgcgccaaaacgatcgactatgccggcgatcgtcctaacatcgccatttgaataagtcatgtccctcgtaggcatcctcagttcgccatcacagcgacgcagctttttgctcctgtctagcatccttctagccatcggcctcgtgggcgtctttgcgatcgccttctacgcgcccaacacagccgtttggaacgccgccaacagtctattcatctcgattgtcgccggtggggtctttgcgctcgcctcgggcctgtatatcctctatttctttgtcgatcccaacgacatggccgcgaccgccattctgctgccgcaggacatcggtcaggcactcgaagacattgcgaataaggccaccgattacaagatcttcgtgcgaaccggcaggcattttcgagccgaaattctccctttgcttgtgaagcaggcacggcggaatcggcttccgatccgcgtcgagatcattctcctcgatttccgcgacgacaccctctgcaccaaatatgcaagctaccgcaaaacgtcatcctttgaccgccaagcctggagcgcgcgatacgtgcagcaagaggtgttggcgacgatcctcaaggttatcgaagtctcgcgagacaatcggggattagttgacattcaactatttctcagcaagcgcctgtcgaccttccgcatcgagggctcttccgacgagattctggtcacccgggaggacccaaaggacactgccgctcgctatctgcgcagtcatcgagacttttcggcattcgtcaacgagctctcctggatacgcgacgatgcctaccggattgcagccaatgacgatggggctctccccacgacgcttgccgcgatgttcggagacgatgcccctatcgcagacatagaagcgcaagccgcacgcgccatgacctcggcatcaccttatgtccgctaagcctagcttccctttggaatgggatctgattcggggtgagccagtgaccgcacttcaagccgccatcaagtcatggctgatgcgagcgaagccgaactgtctgattcacccccacggcttttacgtcgtcatgctgggacgcgacgattcggcggaatggcgcctgcatttctggcctcccggacgacggccggtgaccggaatgccggcttacatccacacgcacaattgccacgtggacagccggatcatcaaaggtgagatcacgaacatcctctatgacgtggccgaacgcccggcggacgggcaaccgctctatgaagtcgactacatcggggatcgatacgccgcggcgacgagaaacgttcttcggaagactgtcaacagagtccaagccacggcacgggcgcaatgtacgtacgcatgcggcgacgtgtaccatgttgagcgcgatacctatcaccaggctatggtttcggagcaaatccgcacggcaacgttggtttgcatgcgtgaacgctcgcttgggcccgtcagggttgtcgggcttgatggctatccggagattatctctttcacgcgcaacgagtatcaatcgctcgacttttgtgaatggctttagcagtgaaaagccttctcctccgtgtttggcttggttatcataatcgccagccgataattgatgccgactcgtgaagatcaatccggctgcatctcctggcgtgctctggcttcgtgcggccgcacttgcttgatccgactccagcccccgggtgcggccttgaatttccaacggatctcaaggccgatagttctctctcagctatcggatgtcaacgagaatcgaacgacacggacgggtagtctacagcttgtgtccgagtagcggaactgcctgacgttcaggcacttatcggtcagggatcgacgctacgcaacgcgtagacgatcgttgctccagccgtttccaggccgtgtactcctccttggcatttttttcaccgtcaacgaattgccatgtcacttcccaccgatttcgttgctgcgctcgactgcccaccgttcgccgagatcctcgcagagttgcgacgcaaggatcgagcacccaagtcgacgtttcttaccctcagaaacgaggtcgcaccaagcgatctgtactgctatttccgcgctcgatttggtcttccgaatggcccacagaattttttgcggaatgacagctcggacaacctgatccactgggaatggatgctacggacgtccaccggttgggtgctgttccaagggacgaacttccggacgatcgtcctccttcttgacactcacggcatcagccaagccgacatgccagccctggccactcagatcaaggccgatttcgcgggtcacggcaagcagatggctcagttgcgaaagtcgctcgaagactggaccgagttcgtgaatccgtatcagcggatccgcagttcagtcaactcgctcctccgcgaactggacgctttgaacctttgccccgaagatgaggcaatcccggacatcacgagcgcccaccaggagcttgacaccgactggtctgaggtggccgcaagatactcaaagggccttggcctatgcttcggcatccgatcgatgctcccggtaatggccgaagctttcgtcaatctcctgctgttcgccctcatgcggcccgaactaaaatccgacgagagactgcgagacaacgcgatccgccagcccatcgacgttcgcatcaaaagtctctccatgacctgcatcggcttcgcgtctccagtggactacaagcatgcagcgttcaaggcgtatcacaccctgatgaatgagagaaacgacctgcttcatggcaatgttgtacttgagaaactcaagtttaatgaggtctatttcaacggccgcgctcccatcttcaagcactacagatcgctatgggagcgcacagtcggtgtcgatattcaggctgttggcctgcaccgactggcgcacgaagtccaggtcgtagacagcatgttggctcagttgaagactcaccttactccgacgacacgcaagttcatcgaacaagtgtctgagcaacgcgaccttgccgttgacgaagggaggggaaagttcggtgtgctgttctcccggcggctcgtcgacatgctcgtgccaggcggcagtgaagccgacccggttattgtgtcctaatttggggacgaccgggttcgacagcgaactaagcgtcgttcgcgatctccccaaggcaactcgccttcgagcaagcctgatctgcctctcgcaatcatcgcaatcaattggcgaggatcatgcagcaaggggcaccgagagcttcggcatccgaacggcttaatgaccgggggacggccaacagcgccgttctctgcctcgccatgacttacagtagccgctgcgaagcagatgctggtaaacgaaacgcggtacagcaggaatgggcagtagagactgccgcccttccctttcggccgcatgtctgattccaggaccgtcattcgcacctacttagatgggtggccgcagtggcttctacatcggaccattgagataaggggggatatcgcaacggctcaaggccgacttccggctagggacaccccgctctaactaggctcacaggcagctctcggccagtttgagacaccggctctcccattctcgatgtccgagctggccgattttgcgacattcgggtcggaccacacctatggccgctcctggtccagtcccgtcaatcatctcaccgcggcatatgtgggccgtgccagcctgcatcaaatgagagcactaactaatcgaagcccttacgcatgcagccccaaacggaattgtcctacccttcatcgaagaaggtcgttgcgttctccgacgcgcgtgggcaagcgtacgcggcccgaacggtttgctattgagatgaaattcaagcgaggacagcgccctatgggcactcggataccgcagggacactgccgaatcgctgtgtcatccagtccagtgcaaccggcaagccgagaagcagcccagtggcgtgttcggtcgcgccgatggtccggaacgccacgttgccaccgcgcgcacaccaggcggcaaacagcttctggttctgcccaaaggggatgatctcgtcgagggttcccgcgtacaccaatgccggtacggcaggcacgccattgccgctctggttctgcgccatgcgcgccagccagtcggcgcggttcaggatggctggagcctggacgaggaccgagtcagacaggaacggatagctggcagtcacgtcaagcaggcattttgtgccgcgaaagtcggcaatcaccgactgcccatagggtgtgaggatcgatgagaggccaagttcagggtaggcggcattcaggcccatcagcgcaatcggccctaccccgccgaacgggccaccattaacgttcgcatatacatcagcgatgctgaatggcccagctcctgcggcaacgccccgcacattcagaccgggggcatatgcgggctgcagttcggccgcgaaagccgctgcatggccaccctgggaatagcccatgatgccgacgggggcgttcgccgacaggcccgccccgctcaactgctgcgccgccagtgccgcgtcgaggacggcttgcccttcggccttgccgatcccccaggtgtgatcgcccggtgtaccaagaccctgatagtccgtcatcgcgatcgcccaaccgcgggcgagggttgccggcgtcgcgccggcaatcgtcgcttcatattccgtgctcagcgcgtactggtgcgagggcgcgcagttgtcggcctggccctgcgttcctggagcccacgcaataaccggccgggggccggagagccatggcgtaaagggcaccagcacggtgccggtgatggcaatcggcaagccattgacgtcgttggacttgtacatgacctgccagccgtaagccagcaatccaaccggaatgaatggacgggagcgaatcagcgtgccatggggcccgctcggcaacggctggggcggcgtgtagaaggcatcgctcctcgggtcgtcgagcgggccggctagcgccggcgcgccagccaggacacacagcgccatggcaatcgccaggactgcgcgtgccgcgcccccggcaagggccatgccaggagcgcgagacattacgcggatccacaacggtcttgcagtacgacgagtcatgcgtcttctcctgtcaggtttgctggcgcaggcgcgcgaaggcgccgtgcctcatggaatccgctggctgatggcgtgcgccgcaacgcatacagccatcaggcaaccacatgcatgcccggctgtgaggcctggcgtgtactgccgcagcgcaatgtccagccgacaaacggatcgccggcgtggcaactcatcacccagcgcgccccgcaggtgctgcagcggtgctcgcaccgcaacaccgccaggtgcgaggagtagtgccggcgggacgcggcggaaagagcatagaggcgcgaatggccggttccgcgcctggggtcctccgacagtcgggcgcagtccgcgcacagcgcctgcggattcggtgaagcaccggccaccaggtcagcctggactggcaggcactggccgtcaccggcgcgcaggcggcggtagaagtcccagcgccgcatgaccgcccagtagaggacgcgcagcagttggccctccgactgcattgccgtggcgaagcatcgatcaacgtgctgctccagcaggatcccgagctcggctgccgaggcaaagcagacaagttgctgctgcccgatgctgttgatcatccagtcatcgaagacctctgccaatgcggcgctataggcctcgctgcccagacgcccggcacaggcggcgagcgcattcgcgcgccggctggcgcggcgaatctcgtgccgcaaggaggtgagcctcgccagcacggcgccgccggtgctctcgctgttgtcgttgccactcacattccatctcctgccggccgacgccatagcgcgtgcggcctaacggtgcctccagcggaggtcagccagatcgccggacagcgcccttcaggccggctttccggtcgccgctgccgcacggcccgccgcttcaagtggcaccttgacgctctccagggcaccaccgccgtcgcacggcacaagcgcgcccgagatgtaccccgcatagggcgatgccaggaacagtgcaagattggcgatatcgtccacggtgccaaagcgctgcatcggcacgctggattgcgcagcggcgcgctccgcctcggtgggcgccatcaaccgccggaagccctccgtaccctcgatcggccctggcgagatcgagttgatgcggatgccatcaccgccccattcgagcgcgagcacgcgcgtaagttggtcgacccccgccttggcggcactggcgtgcgcctggtagcgaatcggcacgaaggactgcggagccgtgatattgatcaccgccgcgcctggcttgcgcaggtggccataggcctggcgcagcacgtggaaagtgccgaccaggtcgatgtcgaccaccacgcgaaatccgttcgacgacatgtccttcgcctcgcacagaaaattgcccgcagcaccggaaatcagcacatcgacagggccgaagcgttcgaccgcttcggcgaacgcccggcctaccgcatcgaaatcgcgcacatcggcgcagaccccaaggaccggcccgccaagctgtgcgagctgctggtgcgcggcatcgacgttctcctgcttgcggctggccactgtcacgctggcgccttgcctggcgaacgcctgggcgatgccgaagttgatgccagtggtgccgccgaacacgaagatgtggcgaccggtaaaatcgagattgacttgcattgacttacctcgtgaagaacgccaccagggccgtaacggcctggcgtcccgttgtcagtcgaacctgggcgcccgcctgtcgataaaggcagcaatgccttcggcggcatgagcactggcagcggactcaaccatcaggctgtgctcaagatcgagctgcacgcgcagtgttctctcgtgcgcaccgtcaaccagttgcttgatccgccccagcgctccggtcgcgccgtgcgccagtgcttcagccagcgcatccgcgcgtgccggaagcccggcatccgggaccacctcgctcacgatccccatctccaggcactgcctggcggaaagcgccccattggtgaagaagagttgcttggcgcgcatggcgccgacgcggcgcgtcaggaaccaggacgaaccggcatctggcgtgagcccgatggcggaatagccgccgcgcagcttcatcgactcggccgccagcacgatatccgcgcaaagcgccaggccgatgccgccgccgccgaccggcccgttgaccgcactgaccactggaaccggcagcgtggcgagcttgtacagggcagtatgcaacgggccgagcagttcttcgagcatggacggcaggcctgcgccggcgtggaggaaggcgtcgatgttcccaccggcgcagaactgccgccccgcagcacgcagcacgaccgtgcgtaccgccgtgtcggtcgccacctcgtcgatgcacccgatcagcgcgcgcgccgcctcggtgtcgatggcgttgccccgctcgggccggttcagcgtaatggtggcgacggcaccttgccgcgtcagaaggacgggttggtccatgttcaggctcccggagatgatgtccagtggtcgaaatgagcagatccgcggctcagccctggcgctgcaggatcgcgactgataccgcagtgcccaacccgccgttgtgctgcagcgccgtgcgggcgccctcgacctgccgctggccggcgctgccacgcaattgggtggcgagctcggtgatctgcgccagcccggtcgcgcccagcgggtgccccttggacaacaagccacctgacggacacaccaccacctggccgccgtaggtgttgcgtccctcgaccacgaagcgctcaaggtcttgctcttcgcagaagcccaggcacgcgtaggtgagcaactcgttgctgacgaagcagtcgtgcacttccgccacgtcaatgtccagcggcgccacgccggccatggcgtatgcgcggtcagccgtgcggcgcgccgcgccccggctcagcgcatcgggcacgttgggcggatcgaggtcggcagaaatatcgctgcctatttcgtgcgcgaggatcgccacgtccatacgcagcccgtggcgtcgcgcaaacggctcgctgcacacaatcacggcggcggcgccacagctcggcgggcaggcgtagagcttgcgcaggcgcccccagaccgtgggggcggccagcaccgcttcgactgtgagcgggtcgcggaagatcgcgtaggggttgtgcctggcatgtgcgcgcgccttgaccgcaatgcgcgcgaacacctcgtccgggatatgcagttcgcgcgccgtccattcgagctgcgagccgaacatcatcagcgctggcggcaacgcgcgttccgcttcaccaaagcccatcgccaccgccacgctctcgcggtggcgctccagcggatcggcatggcctggaaacacccggtccaacgcgccgggctgcatttgctcaaagccgaccgcaagcgcgcattccgccgcgcctgccagcactgcctgccgcgccaggtacagcgccgaagaacccgaagcacagttgttgttgacgttggtgatcgggatgccggtcataccgacccggtagagcgcgcgttcccccgagcacgagtctccgtagacgaagctcgcgaaagcttggtccaccaggctgtaatcgatgccggcatcggccagggcggtgcgcaccgccttttcggccatcacgtcataggggtcgctctggccggggcgcctgaacggcaccatcccgacgccggcgatcagtacattgctgctcatggatctcctcgtccctgtaatcagatgctgcggttctgcacggtccagtacggggttcgcaggtccttcttcagcaccttgccgttggggctgcgcggcagggtggagacgaaatccaccgacttcggtgccttcacgctgcccagcctttccttgcatagcgcaatcaactcctcgccgcttacgtccatgcccgggttcagttcgaccacggccttgacggcctcgccccaggtggcgtccggcacgccgatcaccgcacagtcctgcaccgcggggtgggcccagatcacctgctcgacttcgctggggtacacattgaagccacccgtgatgaccatgtccttcttgcggtccgtgatgcgcaggtagccgttgccatcgatgtgcccgatgtcgccggtgtgcagccagccgtcgatgatcgcctcagccgtcttctccggcgccttgtagtagcccttcatcaccaggtccccgcgcacgcagatctcgccggtctcgccggtggcaagcggctcgttgcgcgcgttcatgatcgccacgcgcaccagcgggccggggcggccgcatgaaagcagccgcgcttcgtcggcgatctcgccgccggagaagttttcctcgggccgcttgatcgcgatcgatcctggcgcctcggtctggccgtaggcttccatcatgaccggcccgaacaccgccatcgcacggcgcagcttttcggccgacatcggtgccgcgccgcagatgaagtacttcagcgaggagtagtcgtgctccccgatgcccggcatgtcgagcagccgatagatcacggtcggcggcaggaagaactcgctgacccggtgcttctcgattgccttgaccagcgcggcaggatccggcttggtcagtaccaccaccgtgccgccacgcgcggtacacggcagcgacagcacacccgccgtgtgcgtcatgggcgcggcggccaggttcacgatcttctcgtcggcgcggtagctgcaggcgatcatgaactgcgcgcagaaggcctggaagctgcgatgggtgttcatcacccccttgggcagccccgtcgtgccgccggttggcatcacggcgatcgtgtcatccggctcgtacgaaacctccggcctagtcgccggttgccccgcaatccagtccggcagtgcgctcgcgcctggcacggcttcttcaatgcagacatagagcctgaccttgggcagcttcgggcgcatcgcctctaccacaggcgcgaacgccttctggaagaacagcacttcgcagtcgaaggcgttcagcaattgatggttctcctccgtcgagccgcgcggattgaccggcatccatgccatgccggcacgccacaggcccagcgtgcaggtccacgcggtgggatggttggcgcccagcaccgcaccgatcttgccgcgccccatgcccgccgcgagcagcgcgtgtgcgatgcggcatgagagcgtgccaactgcatcgaaggtgaacaactcgtcgtccatcacgtaggccgcagcatcgggatcgatctgccagccgcggtcgaagaaatcgatgatcgccatatcttgtctcctgagttccggctagcgccagcgcgtgccggatctcgatcaggcgctgtcgccgactggtttgaagtagcggatgtcccagatgttgcccatgcactcgtccgccagcaccgcgcgcacgcgcatgccggtcttcacggccgcggcgtcgacgtcgccgaggtagtgcgccagcgccgtgtcagcgccatctaggcggatgagcgcgaggacataggggcgggccacgggttgcagcatcccgggctcgcgcacgatggtgaaagagaccaccgtgccggtgtcgctgacatcgacccagtccttcagtttggcaaaacactctgggcaggacagccgcggcggcacatagctgcgcgcgcaggcagcgcagcaggtcgcggtgatcctgccgtggtcgcgcagcgcagcgaagaagcggccattggtctcgcccacgtcgtagttgatgtcggcatacagcaccggctggcgcaaaatggcgggttccgcgtcttccaggtatgcgggatacattgccttagtctccttgtgttgtggcagggtcgcgcaccggctcccagtaaaggatgtcggtcatcaaccccttgcgttcggcctcgggccggaacacggcgcgcacacgcatgccgttgtgcaccttgctcaggtcggtttcgccaatgtagtgccacaggaagccggcattgcggcccggcgaatcgaccatcaggacgccgacgggataggcgcttgactgcaccgacagatcgttggtgtcgatgaatggcatgttgaacgacatgaagcccgccaccgtggcctcgggccccatctccacccattgcggatcctcgaagttctcgccatggcagacgctgcaaacggcctgcggcggcagcatgctgaagccgcaatggcggcagaccatgcccatgaggcggccgttgtcgcgcatttcgcgggaaaacctgccgttgaacaagcccagcgggtactccatgaagaagggcgttcgcaggcgcgtcggcggcacgggaagggtttcgggttgctcggtgctcattgcctttcctccttacttgtccttggacagcagcatcagcggcgtccagccggtgccgccgaagccggtggccaggccaagcctgacatcgcgcgggacctggtgctcgccggcatcgccgcggatctgcagggccagttcgccataacgcagcagggtcgagggaacgcccgggttggtacacgtgaccccgcctgatggattgattggcagttcgccatcgatatcggtggcgccggtgcccatcagcttccacgcctggttcggctcgcacaggcccatggtttccatccacaccagttcggcccaagtgcagggctcgtacatctcgatcacatcgagctgtttggcgggatgcgtgatgccgttgcgcttgtagagcacttcgcacgccttggccaggctcggcagcacgcaacgctccctgggggcgatgaagtcctgcagcgcggcccagtgctgcgcggagtggatggtgaccatgtccttcacccataccggctttttggtgagcttgtgcgccacgtcctcgctggcgaagatcatcgccgccgagccttcggtgatcgggcacatatggagctggcgcatcggcgccgtcagcatcggcgagttgagcacgtcttccacggtcaggtgctcgcgcagatgcgcataggggtttttaagcgcgttgttggcggccttgacccgggcgatggcaaccgcttcctcggtgcagccggacagcttgacataggagctcgccatcagggaaaaggtccccacggcgcccacgctgcaccatttttcggtgagcgcgtgcaggccggaattgatcgccgcctgcaggaacggcccgcgcggcagcgtgccgggcggcgggccgacgaacttcgccgttgccgacaccagcgcgacgtcacaggcgccggctgcgatatggtgtacagccgacagcgccgccgacccgcccacggtgccgccggtttcgatcttgaccacgggcttgcggcggtgcccgacccagtcggccagctccatttccgactccgccgtgcccgacacgtagtcgatgtcggccagcacgatctcgtcgacctgcttcatcgtgatctgcgcatcttccagtgcccgccgcacggcctggttggctagctccgccttgctcagcgggctgcgcgccatcatctccgtctggccgaagccgacgattgccactctgcgattcattccgtttctccgttgccgcgccgtcttgcgtcgtcccgcctcacctggcgggcctcatggcgtggtgcccagaaccatgacctgctgcaattgcccgcaaggccccgaagccagatgggcaagccccgtgcgtgcaccgtccacctggcgcgcacccgcctcgccgcgcagttgcaacacgatctcggcaatacgggccatgccgatggtggtatgggaacagccggacagcgcgccaccggaaagattgacgggctgatggccaccccggctgctcatgccggattccagccagcggccgccctggccggcgtcacacaggcctagcccctcgtaagtcatcagctcctggtaggagaactcatcggtcacttcgagcagatcgatctccttgcgcggatcgctgatgccggccatgcggtaagccttgttcgccgcgatcgtcagcacctcggattccgcgaggtcgcgatcccccaggtagtagccgtcgcagcaattggcctgccccttgatccagacgggcttgctggtcagttgccgggcccgctgctcgctggccagcagcatcacgatggcgctgtcgccgaacgcacgcgtctgcagcgccgtgatcggatccgacagggctttcgagccgagcacgtcggcaacgctgtagtcgcccgcccgcagcgccagcgggttgtccttcgcgtggcgcaggttcttcacggacaccccggcacattgcttggaggtgacaccgtacttctccatgtagcggtttgcctgtagtgcggcagcctgcacgttgtcgaggccgagcggccggcagaagaagggatcgaagaccttgttctcgattgcattgcccccgctgcggctggtggagtcgtggcatacagcgaccacgagcaccgtttcaaactcgccggaggcgatctgccaggccgcctcaaggacgccgacggcgccgtcctggtcgatcttttcatcgggacgcaggttcgcgccggcaacgtccaccaccagcgaggccgagaatggccgcgcgatgcgcgagtgttcgtggcagatcaggcttgcgtcgatcccgcccttctcataggccggcaggaaccgcaggccggtttcctgcagcaccggacggattgcctggtaggccagttcctcgggcgaacacgcccgcttctcgttgtagttgacttgtgccatcgagacgatggcgacacggtttgacatgctcatcttgttgccctcgagctgttgactagttcaccttgcgctgctgatcggcccagtatttgtcgcgcacttgccggcgcagcaccttgccgatcaccgtcattgggagctggtcaacgatggtcaccgtcttcggcgccttgtacccgatgcgctccttgcagaaggcgacgatctcggccggatcgggcgtatggccttccttgagcaccacctcggcgtgcacggattcgccccactcggcatgcggcacgccgactgccgccgacatcagcacggcggggtgcgcattgagcgcggcttcgacctcgatggcgtagatgttgaagccgccgctgatgatcatgtccttcttgcgatcgacgatgtacacatagcggtcttcgtcgacgtagccgaggtcaccggacttccagaagccgccctggaattcggttgcagtcgcttccggattcttgtagtagcccttgatcacgcctggtccgcggatccagagttcgccggtctcgccgaccggcagttcatggccttgttcgtccatcaccacgatctcggtttctggcagcgcgatgccggtagagctcagatgcctgttgctttggccaggcgcacacaggtgctccgccttgctcagcacggccacgggtgccagcacttcgctgctgccataggcctggatgaagatgttgccgaacttctcctgcagcagcgcgagcttggccggactcatcggcgccgccgcatagaggatcgtgcgcaggctggacaggtcaaattgctcgtgcaggccaaattccaggaagcggtaaaggatggtcggcacgaggtggctggacgtgatccgctcgttctggatattggcgcagaactgtctgagatccgaagcgttcatcgtcacatggcagccgcccttgaaagcaagcgtcgtggcataggccgcggacccgtggctcagcggcgtaatgctcaggtgacgggcgtcattgccgaacatgtcgtccggcatcgaatagaagtagcggtgcagggccagccagttgttcagcgtgtacatgcagcacttgccgcggccggtggtgccgccggtgaagcgcaggagcatcggttcgtctgcgtccagctcgatatgcggctccgcgtccgacacgccctccagcaggtcccagaaacaggacacgccatcgcggggcgccgcgagcggatccatgcacacgatgcggatgccgcgctggcgcagcgtgtcgtagtacttgtccagcagcgcggtttcgaggaataccaccttgggctcgacccagtcgatctgccagaggtgttcgtcgaaggtgtcccgaaagttgcaccatgccgccttcacgtccgccttggccagcgtgcaaaaggtcagcaggctcatattgtcgttgtcgaggatagtcaggtagacgtcgcctgacgcaagcctgagccgctccttgatcaagcgggcgatccgattggtgagccggtgcagctccatgtgggtaaagcggcggtcgcgctcaacattgaccagggcctcgcgttgcgcgaaacgcgaggcggcatcgagcgaccacctcgagaagtcgatcttcatctttgtctcctttatgtttttggcttgcctggggcagccgggacggtcagatgccgcggaatgcaggcgggcgcttctcgccgtaggcggcgagaccctcgcggaagtcatgggaccgggtgtgctgctggcacatcagcagttcgtcgcgcagcgcggcatccatcgacaggtcgaccgagcggttggccacttccttcatgcggcgcagtacgagactgctcctggccgccatccgctctgccagcgccgccaccgccggcagcagttcctcgtcgggcagcacctcgttgagcaccccccaggcctgcatctgcgcggcgtcggcaaggtcgcccgtaaacagcagttgcttggcccggctgaggccgacgcggcgcggcaggaccgctgcgccgccaccgccaggaaacacgccgaagttggcatggccgtcgccgatcctggcgctcgccgcgccgatcaggatgtcgcagcacatcgccagttccagcccgcctgcgatggtcagcccgttgacggcagcgatgactggcttgggcatgttgcgcagcagcgaaagcgtggccagcgtgcgatcggcgaaattcggctcgcccggggcggtgtcgaggccggcaagcagcgccttgagatcggcgccggcgcagaacgcgcggccggatccggtcagcactagtacggcttggcccgcatcggcccgtactgcagtgagtgcatcatgaagctcttcgagcatgcgctggttcaccgcattcagctcggctggccggttcaacgtgatccacgcgactggcccccgctgttcatggataatggtttcgtagtgcattgcgctgtctccttgcgaggcgggatgcagcgttacagcgtgccctggccgcccagcttgtccggatctggctgtcccttcgcttctggttcaatgatgggttgccggccgggtgggcgcaccacacttatcgggtgtaatcgggtgtgacagggccagagctgtgcgccgaagacccatcgtgcgggatggcccgagggacacagcctccaggcggccgcttcgaccttccgcggcacttccgataagatgcccttcgcatgtcagcaggagaccctggcttggcccccgatcgccttcttatccccaccaagttcgcgccgccgcgcatcagcccgcagtccacgccgcgggccaagctgctggcgcggctgctggattcgcgcgacagccggctgacgctggtgtgcggcagtgcgggcttcggcaagacgaccttgctggcccagtggcgccagcagttgctcaaggacggggaactggtctgctggctgtccctgtcaccggacgagcggcacttgccgcagtttcgcgcctatctgaccggcgcactgcagcaggcaggactgcccgtcgatgacggaactgcccttgcctctgaggtgcgtgccgatctgccggttgcaggactgatcgcgaccatcgttgacgcggtgtgccagcgacgccaggaagtgttcctcttcatcgacgactatcatcacgtcgacgacagcgacacccatgcgctgatccagggtctggtggatcacgggcccgagaccctgcacctgatcctggcctcacggacccatccaccgcttgccgtaagccgccagcgcctgaccggggagctgtcggagatcaccttccccgacctgccgttcgatttcgcggaaacgcaggacttcctggccaagcacctcggcgacgtcgtgccggacgatgcgcgcctgatccacgacatcaccgacgggtggccggtttgcctgcagatgatctgcatccggctcaagcgcagcccggccaaccgggacgtgctgtctcagatgctgcatcgccgcacggatctgcagcgctatctttccgaagacgtggtgcgccatctggcgccagacgtcaccgacttcatcgagaagctctcggtcttgcgccgcttcaatgccgatctggcgcaacacgtcacagccaatgcaaaggcccccgcgctgctcgaccagatcgagcgtgaaaacctcttcctgttgccggccgagctcgacagcccccagccgtggtaccgatttcatccgcttttcgcaagcttcctccaggaccagctgcaacagcgcgatcctgcgctgatgcgcgagatccatgcgcgggccagccagtggttcgagcaacgcggcctcctgattgaagcgctacgtcacgcctatcacgcgcacgacaccgaggccgcggtgcacttggtcgagcgggctgacctgccaatccgcagcatgagcttcttcagcacgctgcaacactggatggacgaacttccggccgatatgctgctgggccatccccggctgctgctcctcggttgctgggcactggtagccgcgggccgctggcgcgacgcgcagggctggcttgagcggctggagaagacgccgcgcacgctggcgccgggacttgccttgcacgcgctctatctgcgggccagcatcgcgctgcaacgcgacgacaccgaagccgcattggccctcgtggcgccgtcggacttcgaaagcctgaccgatcgcttcctgcgccaggcgcacctggctgtgctcagtttttcctattgcgcggccgggcggtacgaggacgcccgctcgctccacgagcacatcgcgcggttgccacgctccgagcttcaggatgacatggccctggtggccgaatcgaccctgctgctcagccacctgctcgagggcaacaatcgcgaggccatccggaccggcagcgccctggtggcgcgcgccgaggcagcgcacggccggcgttcggtgtcggccgtcaacagcgcggcattcctcgccaacgcgtattacgaggccgacctgctggccgaggcgaacgaagtgctggccaaccggctcgatttgctgcgtctctcctcgcccgagccgatgacgcttgcgatcatcgtccgcagccgcctgatggcgacgcaggcatcggcagcgcagggactgcacgcgctgagcgaggaggaagtccgctgccgcgagctggcattggatcggcctttggcctatgtgctggccggacaagcgcggttggaactccagttgaaccatcaggatgccgcccggaagctgcagaccgaacttgaccgattggccagccgctatcgctacggaacgggtttcctcgccgagatcgaggcgatcgcggccctgaccggagcccggctggcgctggccggcatggactggaacgaagcgctggcgcgcgcagaaacgctgcgcaactacggtgtggcatacgggcggcaaaaatgtgtggtgcaggccgacttgctggcgggcaccgcccttgctgaaatggacgaggctaccgaagccatgcgtcttctgcgggctgctgtcgaagcagcccagagactagggctcgttcgcacgttgctcgatgaaggcgagcgcgtgcggcaggccttgcagcaactgcagcccacgcttggccccggctccggcggcgactatctggtcgaggtcctgcgccgcggtgtcgcggcgcatacgccggttcagcaggccggtgagcccgacgcgcaggcgaacggccccgagctcaagccgcgcgagattgaaatcctgcgcctggccgcggagtccatgtcgaacaagcggatcgcactgaccctcaacctcacgttggacacagtgaagtggaacatgaagaacgtgttcgagaagctgggggttccgagccgctacgacgcggtgatcgccgcgcgcaggcgtggcctgatcgactgatggcgcgatcactccgccgcccgccggacacccggaaagtgtggtgaccgtatggcgtcggcgaaccagaatctcctggcaaggcatccatcacggccgcatcgcggctgatgcgccacaggagacatcatgccccaggagcaaacgacattcccctccgcagcaatgctgccaagtgatgaagagcggctgatgctgcaggagagcctgcgtcgactgctcgcccggaggtggcccgccgcgcaggccgtggagtttgccgcagacccccaggcgctgacgtcgatctggcgagacctggcggagcaaggcctgaccagcctgggcagcaatccgcaggaaggcggtatgcgagaaattgccgtggcgctggaagaattggggcgcgccgcctgcccagcgccgctgatcggtgccgcacttgccaatctcgccctgtcaccgcacctgcccgggcgtcccagatccgacgagtcggccgcgctactgagtgcgctgcatcgcggcgacgccagcgtgagcttcgccttcggcggctttgacggcgatcggcaagctggcggcgtgcgggtcgccaacggcaagctgcagggtcgcattgcctttgtcgaggccggaacgcatgccacccacctgctcgttctggccgagccggggccggtactagccatcgtaccgcgcggcgcggtcggcctgagcgtgacggaaacacctgggttggcggtgccaccgctggcagcggcaagcttcgatcacgtgcccgcgtcaacgttgccgctcccgcccgggctggccgaggacctgcgtcggatcggcgcgcttgcgctgctggcgcgcgcgctcggcaccgcccggcaaggcttcgacatggccgttgcctatgccaaggaacgacagcagttcggtcagccgatcgggcgcttccaggcgatacagcacaaactcgccaactgcctgatggcgctggaggccgcacggctgatgctccacaacgccgccaggacgcatgacctcggctccgagaactggcggatccttggcgcagccgcacgcgccttcgccggccctgcgctgcgtcaggtatcgctcgaaacgcatcacaccttcggcgccatcgcatactcggaggaacatgaggcaccgcggcatttccgccgcacgcatgcggatcttgcgcgtcacggcggcgtacgccaggcgcgtgaggagctcgcccgggccctgctcgagcagggcgcgatgcttcccgagcacgatctcggcccggccggaaatgcgttccgtgatgagtacgggcctggctgaaggaaaactggtccggcgattcgcccagacacgaacaagaccatgcctacgaagagtggggctatgacacacagttcaccaggctgttaggcagcaaaggctggaacacgatgagctggcccagggagtatggtggccagggacgcacgccctacgagcaactcgcattcatggaagagatccagcaagccggtgcacccatgggcggccgcggggacatccaggcgcatgcactgatggcgttcggtacggccgagcaacaggccgagttcctgcccaagctcgcccgcggcgagatcaccttctgcctgggctacagcgaaccagggtcgggctcggacctcgcatcgatgcagacgaccgccgagcgcgacggcgacgagtgggtcatcaacggccagaaaatctggaccacggccgccgaaaaggcggactacatatggctggccgcccgcaccgaccggaatgcggtgcgaccgcacgcgggcctcagcatcttcattgttccaatgaacagcccgggcctcaccgtcagaccatcgatggcaatgtacggtcacacgttctgccaggaatttctggacaatgtccgggttcccgccagtgcgttggtcgggaaactcaacgacggctggacagtcctgacatcggcgcttgcaacggagcgcatgatgatgggaagcttcatcgccaatgcccgcgcggaattcgaacgactggttcgttgcgtccgtgacaagacggtgctggccaatgatggggcagttcgcgaccgcattggcgcgctggcggccgaagtggaagccgggcggcagttgttcatgaagagtatcgccatggccgagcaaggcaaggtccccattcatgaagcggccatgagcaaggcctttacgggcgaattgacggaacgcctaggccaagcggcgctcgatatcctcggcactggagcaaccttgtccgaggacgccgaaagcgcgatcgccagcggcaggttcgaacggttgctgcggtacgcgatcctgaccgtcatcggcggcggcaccgcggaaattcagcgaaacctgatcgcccagcgtgggctggggttacctcgttgaagaccgatgccgatgcccccttcagcccacgcatgcccccgtgtcattacctcgtactatgggcgtatccggcttcactggggcagtaccaagcttggcgccttgtgccgtcatagctcacaatcgaccgcaatgggtcggaaaacgatcgtttgtcttatgtcgaccaacttccgctgattgcctgaacagcctttcggactatcgcgttggacgtcgcagtagggtcgactgccgccgccgctgatatccaatgtgtccttcccatcaccgaacgttccagaccgcgcgcatgaagcgctactgtcacgccaacagaccggcattgcaaactggctacccggcttgacagccagtctgcgcggcgtcggtcaatccccccgtgtcggccgctcaacccgtcggagacaccccacactgctccaggattgaacacatcgattcaaatcacaacaccctgcgattcgcacgggatcaatcgctgccaaaaaatctctttaaggacacaggtacagttcgtgcgtcatggcatgtgggtgcaagacacctcatcactacaatattggagacgccatgacccacctgaacgccgctgatcgcatcgacagcttcttcattccctgcgtgactctcattggtccaggctgtgcgcgcgagaccggcacgcgcgccaaagcgcaaggcgcaagaaaggccctcatcgtcacggatgccggcctgcacaagatggggctatccgaaaccatcgcggggtacatccgcgaggcagggcttcaggccactcatttttccaggggccgaacccaatccaaccgacgtcaatgttcatgacggcgtcaagctgttcgagcaggagggatgcgacttcattgtctcgctgggcggcggctcctcgcacgactgcgcgaaaggaatcggcctcgttaccgccggaggcggacatatccgcgactacgagggcatcgacaaatcgacggtgccaatgacgccgctcatttccatcaatacgaccgccggcaccgctgcggagatgactcgcttttgcatcatcaccaattcgagcaatcacgtgaagatggccatcgtcgattggcgctgcacaccgctgatcgcaatcgacgatccccggctgatggtcgcaatgccgcccgcattgactgccgcgaccggcatggatgcgctcacgcacgccgtcgaagcatacgtttccaccgcggccacgccaattaccgatgcatgcgcggaaaaagcgattgcgttgatcggcgagtggctgcccaaggccgtagccaatggcaattcgctggaagcgcgtgccgcgatgtgctacgcgcaataccttgctggcatggccttcaacaatgcgtcgctcggctatgtgcacgcaatggcccatcaacttggcggcctctacaacctgccacatggtgtgtgcaacgcgatcttgctgccccatgtatcggaattcaaccttattgccgcgcctgaacgcttcgcgaagatcgcagaactgctcggcgaaaacgttgcgagcctcagtaccagtgacgcggccaaggctgcgatctcggcgatccgggctctcgccgcttcgatcggcattcctgccggcctggccagcctgggcgtcaaggcggaagaccatgaggtgatggcgcacaacgcacaaaaagatgcatgcatgctgacgaatccacgcagggccaccacggcgcaagtcatcgctatcttcgctgcagcgatgtaaaaggtatgccccctccgacgaacgcgggagggggttcagcggcacgattaacttcgcgtgtttagacttccacccaaaggagtcacgatgatttcctcctatgtcgaaccgctttcctgcattcacgcagaaggctcaccgcaacagtcgcagcaatcgatgcatcttgcgcgccaagaccttgtcacgcaccttgtgcgcaagaggcccacggacgtgctcatggatggctcaaacgagcgacccgatgtcaggaccgtcgccgtgctgggttacaactagagcgaagacgcagcaagcaccattctcttccaatagcccaaagcgcgctgcaggcgcgcggcacgcccttgccggaccgctgtcggtccgccgcggaatgcgatcctgtgaagccgatcagtccctcgagatcgggacgaaatgcctggggtcgtggacgtgcgccggctcgatggcgcgctaggcctcgaccagttcctcgaagtcgctatcgtcgagagcgcccttgcttcgagcattggtcgagaacccggtggacgacctgccgctgtcgggggattggctcatcgattcggcaccgatgctacgcccgctctggaacagcattcgcttgtcgagatgggttacctccgctttgacaaagaccagcggcttgctcgcgtagcaccccaagcacgagtccttccgataccttatggatgtcgaagctgcccattgcggatgatgcctcgacctgtttttttctagcagcgccatgagttcccggaaatcgttgagcaggtcaagatgcttcaatgtgctctccccggttggcttcccattcttcgtccggcaaagcgcattgtgaatcttggacgccttggaaaaagtgaaatttggaactgcatggtgactggagggtcgaccacaagcggctggcgctcatacttgcagccgcttgatctttgactcttcaagctctcctggaactttgctcgtccttcggcactatcgcgatcaaccgcgcatattgcaatgacagtttttgggccgctaccgcgaagccttgaggaacttaggtgtctccctttgatttcgctaatggacgaatggaacgacgtaggaggtccggcatttcgccaaagcttgctgcgccgtggtccaaaaaagaatatgtgcagtccaacctcttgatcatgggccacatgctcgccatgtgagctcctgccgaatcccttatagccccgccggcaccgatgcctccgcgtacccgcaaacctgcaccgatcgccgatgagatctagcgagcgccggacgggatcaacggcggagaacggccagtagcggcctttgaccgcgacgaagcgaagggccgttctaaatccactttttgccattcgaccaagtggcgtttcatgacacccctaggttctcgacggcctcgaagttgattcaaggaaatgaacatcgggcaagcgctacccacgatctcccacatcaagctgttcgtgcggccattgaccgaatgcgcggacggcattgccggcaccttgtcgacatcccggcggtggcccgctacctggcgccaggatgtccccagccccacgcgagatcggagccagataggtccgacagcgcagcacgggtagttggcaggatctgagggtcaggcacgcgacggaaaaaagcgcggatccactgcatccctagccgaccgcggccgtcgcggcagtcctcacgctttgcattccttacgccttgcatgacggcggccatgggtggggcgccgcacagcgcctgccacgacccaggtgcacagcgccgggtggaagccattcaactgcccgatctgcgcgaccagcccgaaaagccggtggatgcgggcgcatcccgatccgaccaaggtccctctggcggtcaaggcccgcagcccgccacgcaacgaggcggccgccgggatgttgccccagcatatgccgcggcatccgcatctcgtggtgccaccacgagttgaagccatacacctagacgacgtcttcttgtccacggagacgaaagcctgagcaagctctcgtcacgattacccggaccgctacctcgccgatcctccgggaatcacgatgcccacacattaacacaacacgtgttgtcttaaagagcattgcgggttattgttcatgcatcgcgccggccagcgtccatcacgaagaatgaaggagaccgatcatgctcaccacccaatcccaacgagaagcgtttcgcaatgacggcgccgtacttgtagaaaactgtcttgacccggcgcagctcgctcagtgctacgaggcgttcaagtggaacgtcgccaatccgggtccgtatcacttccgctcgctggacggcacgagcctgcagacccatatcgacaacgccaatccggtcgtcaaggacaagcttgacgatctggtctcgacgctaccgttcggaaagatattccagcagttatggggatcggcgcatgtctggtatttcgccgaggaggtgttcgccaaggaaggtggccaaagcggccgcggaccgtggcatcaggacaccgccaacctaccctgggccggcaagcactggggcaacgcctggatcaccttccagcccattccaaagaggaattcgctggagatcattcgcggctcgcatctcggcatccagtacgacggggccagcttcgcgaatgccgatgacccgaccgatccgctctacggcgacggcacgctgccccgccttccgcatatcgacaaggaactcgccgaagatccgaacgcctgggacgtgctctcctggggcgtgacgcccggcgacgtcgtattcctgcatccgcgttcgctgcacggaggagccgccgtcgacgccgactgtccgacccgccataccctggtacttcgattcttcggtgacgacgccacgttccgcgccctgccgctgtcgaacccgcgctatgcccgtaacgggcccctattcagcgaagaaatggccaagctcaatgaaggcgagccgttccgctcgcctgtcttccgccagatcgcctgatatcgccttggacggagaagcagccatgaaacgacaaatgatcaatcccggccttgcacaggcaaggcactacgaccagcttcatttctcgtcggcgacccgtgtcggcgacatgatctgggtgtccggccaggtggggttcgatctggcgacggccacggtgggacagggaatggaagcgcaggcccgacaggcgtttgaaaacctgaagacggtcctcgaagccgcgggagccagcatggccgatatcgtggagatcatgactttccacaccgacttgcgcggcgacatccatgagtttgtgaaggtcaaggatgaatacctacccgaccgctatccctcgtggacaggcgtgggcgtaagccagctggcccgccccgagttcctcgtcgagatacgcgccattgcggtcgccggctgcggcgccggctgactgccggatgccgccgccccgtttgcacaccagggtcgcggcacacgatcccaaaagaaaatagaacagcgacaaagctgatggagacaccaacatgaatcgtcccaatacggttgtcaggccggataagccatccagcatcctggcgaggcttgaccgcctgccggtgatggcttcccactacgtctgggccgcgctgctcgcggccaacctgatgctggagtattacgacaacgccatctttgcctacgccagtccaacgatcaaagcccataccaatctgagcacggagcagatcggcctcatcagcagcgcgttcttcatcgggatgattgtcggcgcgctggtgggaggaaggctgtctgacaggtggggacgacgctcggttctggtatggaccaccgtcctgtactcgctgggcgcgttagcgacggcgttcgcgcctacctacgagaccatactggcctcccgcgtcgtcacgggtgtcggcgtgcaggccgccacatcggtgctgcttgtctatatcgccgagatgtttcccggcaaggcgcgtggccgtttcgtctccatcgtgacgatcgggttcgtggtctccggcatcggggctgcggcgctggcgatgttctatctcccgcacagcagtaccggtgcctggcgcaacctgttcctggctggcagcatcggcctgctgattgcgcccctggcacgcttggtcctgcccgaatcggtgcgctggtgtgtgtcgcgcgggcggtccgaccgcgccgaacgcatcgtcagcgaactggaagcacgcgcactgcgccgcggtccgctcgacgaacccggaattgcctcagctcaacagaacgccgcagcaccaacactgcgcgacctcatcaacaacaaggccgttcttcgaaccatagccattctcacgctcggctatttcggcgccaccctggcctactacctgttcgggcagtggggcgtctactcgctcgtgtacagcctcaagtactccgaggatgatgcgtatttcatcctgttcctgtggaacgtgatctatggcgtcacgccgttcgtagccatgctgtttctcgaccggtatgaacgcaaatccaccatccttgttgtgtccgtgctcagtgcactgccgttggtcgtgctcggcatctcggccaccagctgggtggtgatcggtgcggggggcctcgcctccatcatcaccgggctcgtcgtcaacgcgtactacacctacatcccggagacgattccgacgcagctgcgcgccctgggcagtggcatcgtgatgtctggcggccggttcggcggagcggccgccggcgtcctgggcgccgcgctgttctccgcaagcggcatggcgggtgtaatgctcgccgcggcagcctgctacatcgtgttctccatccccgtcgccctgttcggcccgcgcacgaccaaccgctcgctggaagccgttaccgacgaagggcccggcgccgcaaacggcgtgcgtcaatccacggacacgcccatggccgcctgacacggcatgtcagcaaattgccgggtggttgtgtcccggcagcatggatctccagaccaaggagcacggcaacgtgactgaagacttcaagacataccgaacactgggcggctggatagaaaagccggccgatctgcagccaccgctcgagggccacaccaacgccgatgtggtcatcgtcggcgcgggctttgccggcctctgcgcggcgctggagcttgcgcggcaccgcgtgaaggtggtcgtccttgaacgcgaattctgcggctatggagcgagcagccgcaatgcgggctatctcgccggcgggcagggactcaagtacgaccgcttcctcaagcgcgcaggccatgagaaagcaaggcagatcgtccgcttctacgaggacggcgtcagcttcgccgaaggcaagttcgccgagcacgggatagactgcgactacaaccaatcgggactgatccgtgccggcatcgacccctcacaggaagccagggtgcgcgacgatatgcgcatcagcgccgaactcggatgcccatcggagtatctggaccaggccgagatgcgcgcacgcggcatcccgccagcgttcctgttcggcagctacgtgtcgaacggcggcacgctcgatcccggcaagtacgtcctggggctgcggcgcgcagccctgcaggcgggcgtgacgatccacgagaacacgccgttgctgtcctacaccgaaggaccgaccgtcaaggtgcggacgccgcgcggcagcgtcagcgcgccggtcatgatcctggccaccaacgcctacacgccgcaactcggcccgctcgcggacaaggtggtgccattgcggctgtcggccatggaaaccgaaccgctttcccccgtccagctggccgcgcttgggtggcatcgtcgcgaaggcatcacgaccatgcactgggtcatggagagccatcgcctgacggcgcgcaacacgctggtcgtgacgaccaagcgcctgcgctacccgttcggctcgcagactccggacgtgccagagcatgcccaacatcgggcgctgcggatggcccttcacgaccgctttccacccctgaagggcatcgccatccggcgcagctggagcggctacatcagctatgccgacgatggcctgccggtgatcggcaccaccggagcggatcggaacatctactacgcggcgggatgttccggccacggcgtcggcacacagggcatggtcggacacatgctggccgggaagatctgcggtatcgaaaacccgctgcttgcgatgctgatgcaacacatccccccattgacgctgcccgagccgctgcgctggtttgctctcaacggcgccctgaaggtcgcaagcaggctcgatgaacgctcgaaccgcaaggcacgcgccgcatgaaggagcgccggcggctgctacgcgattgcatgacagcagggccttgcgaaacccctgcatcccccgaaactcactacggatgtactcatgacagatctgtacgatgttgccgtgattggcgctggctttgcaggcgttactgctgcacgggacctcagcatggcaggccattcagtggtactgctcgaagcgcgtgaccggattggcggccggacctggtggggaaaggcccttggcctgcacctcgatctgggcggcacctacgtgcactggacccaggcgcatgtgtggcgcgaactcaagcgctatggcatcgggctggcgacgccaatgccggtgacgagagcctactggtacgccgacggcgcggtgcacaccgggacgtgggagcaactccaccaactgaccgcgccgctggtcgcccgcttctttgccgatgcccggatgcactttccccaggtggatgacctggcagcagccgatgtcagcgcgatcgacaggcaaaccatcggcgaccggcttgacgcgcttgaactctccgcgcacgaccgtgacctgctggtcaacgcgatgtccatcctggtttgctctgaacacgagcagggactcgcgcaactgctgttctggtgcgcgatctgctttggcagctggagcgcgttcaaggaagtcgccggccactggccgatcgagggcggcaccggtcgcctgatcgacgccatgagcgccgagtcgacagctgagttgcgcctctcgacgccggtggccgctgtcgatgacaacgggcatgaggtcatcgtgaccacccgcgatggacagcgtatccgggcccggcgcgccgtggtggcattgccgctgaacatgctgagcgagttttccgtcacgcctgcgctgccgcaacccgtgcgcgccatgatcgagcaaaagaacccgatcatgcccagcaagatctgggtacgggtcaggggcgagatcgagcccttcgtgatctatgcgccggcgggcaagcatcccatcaataccgcccatgccgaacgccgcgacgatggcgatacgctggtggtgtgcttctgcgccgatccctcaacgctggacggcaatgaccgcgaggcagtacagcaggcgctgcgggacttcattccggacatcgaagtagtggacaccgtctgccaggattgggcgaacgacccgttttccaaaggcggatggatgcatcaccgccccggcaatctgacgcaggcagctcccttgatgcgacagccccacggccgcatccatttcgcaggagcggacatagcgccgatcggggttggcggcatcgacggtgccatcgagaccggcactagggctgccgctgacgtcgcccgcgccctggatggcgcccatcatccctgatccggtgctacgtgcgcgccgcccgtccgccaggcttctgctcccctggcacgggcgcaaccagcaccgccagggcatcgatcagcgcccgcattcgctttggcgtgaatcgcttgggctcgatggggtacatcatcatccacccgtcgcccatggcaacgagctggtcggtgaggatgtccgccgaaatatcgttgcggaccgtcccccgttcctgagcgtccttgacaatggcggcgagcaagcggcgataacgcgcgtagcgcctggcgatgacttccgcaaacgctggctcgtgtcgcccctgcgccagcaactccgatgtcgccggccagaacctcgtgctgcggtccgtcagccttatccagctttcgaacggcgcgaggatgtcacccctttcccgggccgactccagcatcgcgtcgaaacggtcgaatgcgctttccatcagcgccaccaccagctcttccttgttcgcgaagtaatacgtcaccgcgccagtggtgtagcccgcatgcttggcaaccttgcgcagcgatgcgttggcatatccctcctgtgcaatcaccattgatgccgcgcgcagcagctccttgcgcttcgcttcgcggtcgccgaccggacgaccccgggttgagacctgctcgatatcgtcgtcgctgtccatgttctgttctgtctcttgaggatttcgataactggatgccgactggttagccgccagaagcctgattttacagaatcgacgttatgttctgattctagcctctccagcgttctcgcctccagcatctcccagatgcggcgcattccatccggatcgcgaagcctgtgtccgcacacgccagcatatggcaacgcctgtgcccctctccttgccgggaccacgcagggaatacccgccctttctatttaacatcacgctcgttatgctaattcacgattcgcgcgaatcgccgggcaggacttcaggaagagtgcgcggccgatgttcttgcatgcggccgccaggcaactgacaaacatggagattgttgatggatgcattcaggcgtaatgcgttgagcaaggatggtgccgtcgtcatggaacagcgccgtgaggagaaacaccgagtgccgcgcaatgtggcacgcaactggggcaccacgcctgttatcgcactggcagcacttggtgccttcgcaggcgcggcacatgctcagtcctccatcacgttgtacggtacgctggacaccaaccttgaaatcgataccaacttcaagagcgcgggcggcggctcggccaatcgatacgcgctgaacggcgaaggcctgtctggttcgcgttggggtctgcgcggcgtggaggatctcggcggcggcgtgaacggcgtctttgtgctggaaagcggcgtcggcggcgacgatggcaccatgcagcaaggcggccgcctgtttggccggcaggcattcatcggcctgcagagcgccacctacggcaagatcaccttcgggcgccaatacacctcgatgctcgaggcactggccaacttctcgccggcggccatgtcgagcctgtatgaacccgtcatcgcccagatcggaccggtgtaccgcgaagacaacaccgtcaagtattccgggaccttcggtccggtcagcgtcggggcccactggagttttggcaccggcggaagcagcggcaccgtggacctcagccgccttggcggatcgggagaggttccgggccagtttcgccgcgataccggctatggtgcccgggcgtcctatacggcagggccgttcagcgctaccgtgacctatgatcaggtgaacccgagcatcatcggcaatagcggcttcgccggtaccggcacattcaagaaggccgccgcagcagccagctacgccgtcgggcccgcgatcttcatgagtggataccgctggggcatgtcgactgcgccggggcagacactgacgcgcgacaatctgtactgggctggcgtctactacgagatgacgcctgccctgagcctgacgctggactactactaccagaccttccggtcctcgaccttgccggcgctgaggcctgcgggcaatccaaggcagctgatgttcatcgccgactaccacctctccaagcgtacggacctgtatctgaccaccgcctatgcgaagaatgctggcctgtgcctggacaccgcatccattgcgttcaacaacggctatcaaccgggtgctggcaagaccagcatgttcggcgccgcactaggtatccgccacaacttctgagcgcgacggatatcctcaaaccgttgccgatgccaacccgatgcgatgctgcttcagcgatctgcatcgggacatggcgcgagggccactgccgaaatggcctccaaggtatgtcacctcatccgatagacgccatcttcactcacctcaacccgcccgtcagccagcagctccgccagatgctgagaaatcgtacgggtctcggcgttgaccacccacaagccttcatagcccggcggatacagcagccgcaggtcgaccagctgcgccagtgtctttggcgattcgcgcagcatggccatcaggcgctgttcgcgctcgtccagcttggccacataggcagcgagatcacgcaggaagtgctcgcgatcggtgtagacgccccggtgatgggacgtaacccaaaccttggccggaatctcgggcagccgtgccaggctgcgacggaagtccgccaggctggaccccgcgtcgccatagtaaggcccaaatccagtcaggtcgatgtcgcccgtgaaagccactccctccggttcaacaagaagaacggtgtggcccgcggtgtgccctggaaggtggaaagcgcgaatgccggcctgccccagaccccagcacgcgccgtcgacgtagccttgcgcatcaggccgcggcgcataaaagaaatcgcgctggaacttgagcagcgtctccgatgcatactccgcattgccgaaagcggcgaccatgccgtcccagctccttgccgctggcaaatcccgttcgtgcacatataccgatgcatacggaagacgatgcaaaccggccatatggtcctcatgcacatggcccatcaccaccagctcggtcgcgtcaaattcggggccgatgtagttcgcgacaagcggcgtgtcgaacgccgcgcgagtctccgagcctcgtatcaatacctgacttccgtcgggatactttccgcttttctcgccgaagaagaccgaaacgcgcccgaaatccacgcgctggatgtttccctgcatgtcggaattgctaaaagctgtgctcatgtcgatcatcctccctggcagtccgttgcgatcttcccgcagccgaggcgttccaggagcggtcaggcgctacgcaactctgttttcagtctatttataataacatctgtcataaaaatagagtgcctgcaaacacagaccgtgtgatattttgggatggccgttttagagcgtcaaccgacttcctcgccctgcaggctgcgcatcgtcagggctagttgcagttcttcggtgactatggcgcgctcgccgacgcggctgccttcgcccagtggcttgcaccacctcctcccggtcttcgtcgggatcagtccgttgctttgagcatatcttcgaccaccttcttggcgtcgccgaacaccatcatggtcttgtccatgtagaacagttcgttgtccagcccggcatagccggcggccatcgagcgcttgttgacgatgatggtcttggccttgtacgcctccaggatcggcatgccggcgatcggcgacttggggtcgttcttggccgccgggttgaccacgtcgttggcgcccagcaccagcaccacgtcggcctggccgaactcgctgttgatgtcttccatctcgaagacctggtcgtacggcacctcggcctcggccagcagcacgttcatatggcccggcatgcggcctgccaccgggtggatcgcgtacttcacggtcacgcccttttcggccagcttctcggtcagttccttgagcgcgtgttgggcgcgcgccacggccaggccatagcccggcacgatgatgaccgtctccgcattgcccatcaggaaggcagcgtcatcggccgagcccgatttcacattgcgctgcgcctgccctgccgggccgctcgcggccgcggcgtcgccgccgaagccgcccaggatcacgttgaagaacgagcggttcatcgccttgcacatgatgtacgagaggatggcaccgcttgcccccaccagcgagccggcgatgatcagcatcgggttgttcagcgagaagccgatgcccgctgctgcccagcccgaatatgagttcagcatcgacaccaccaccggcatgtcggcgccgccgatcgggatgatgatcagcacgcccagcacgaaggcgagcgccagcatgaccaggaacggcatccacgcctgcgtcaggaagaatgcaatgccgaagcctaccatcgccaccgccagcagcaggttcagccagtgctggccggcaaacaccaccggcgcgccctggaacagccggaacttgtagcgcccggccagcttgccgaaggcgatcaccgagcccgagaaagtgatggcgccgacgaagcagccaatgaagagctcgatgcggttgcccagcggaatgtcgtgcgaaccggcagccgtgatgccgaaggcagcgggctccgccactgccgccaccgagataaacaccgcggccaggccgatcagcgagtgcatcgccgccaccagttccggcatcttggtcatctgcaccttcttcgccacataggcaccgataccgccgcccaccaccagcgcggccaggatcagcgccaggccggtgcccggcgcggacgggtccgccccgccggagaacaacccactcttcagcttgaagatcagcgccaccgtggtaagcgccgcgaccaccatcccggccatgccgaagacattgccgcgccgcgccgtggtcgggtgtgacagccccttgagcgcctggataaagcacacagacgcgcccaggtaggacagcgtcaccatattcatcgacaggccattcattgcgctacctccgccagttttccgccgggctgccccttggcttcgggctgcgccttgggtgccttcttcctgaacatctccagcatgcgctgcgtgaccaggaagccgccgaacacattgaccgctgccagcgccaccgccagcgtgcccattgcgcggccaacgtagccctcggtcaggccggcggccagcatggcgccgacgatgatgatggccgagattgcgttggtcaccgccatcagcggcgtgtgcagcgcgggcgtgaccgtccagaccacgtggtagcccacgtagatcgccagtacaaagatgatcaggttgatcaccgtgtggctaaccatttccatcgatatctccttgattgccggatcagctggccagcgccagttcttcgcgccgtgtcatcaggcaggccgcgaccatgtcgtcgtcggtgttgatcacgagcttgccgtccttgtcgatcagcagcttgagaaagtcgagcacgttgcgcgcgtacagcgccgaggcgtccgccgcgaccatgccggccaggttggtgtgtccgatcagcacgacgccgtggcgctcgaccacttcgtcggccaccgtcagcgggcagttgccgccctgtgccgcggccaggtccaccaccaccgagccgggtttcatctgcgccacagtggcttcctgcagcagcaccggcgccttgcggcccgggatcagcgcggtggtgatgacgatatcggcctggatcgcgcgctggtggaccagttcggcctggcgcttcatccagtcgggcggcatcgggcgggcatagccgcccacgccctgtgcgatctcgcgctcttcgtcggtgaggaagggcacgtcgaggaacttgccgccgagcgattcgatctgctccttgaccgcggggcgcacgtcggaggcctcgatcaccgcgcccaggcgcttggccgtggcgatggcctgcaggcccgccacgcccgcgcccaggatcagcacgcgcgccgccttgacggtgccggcggcggtcatcagcatcggcatgaagcgctggtagtggtgcgccgccaccagcacggccttgtagccggcgatattggcctgcgacgacagcacgtccatgctctgcgcgcgcgtggtgcgcggcgcggcttcgagggcaaaggcggtgatgttcgcggcggacatgcgcgcgttgttctcggcatcgaagggattgagcatgccgaccagcacggcgcccggtttcatctgcgccagttcggcggcgtccggtgcgcgcaccttgagcaccagctgggcgcccagagcttcggcggcggtgccgatggtggcgccgaccgcctcatacgcgctgtcgggctggctggcgcttacgccggcgccggcctgcacgaccaccttgtggccctgcgcgacgtacttcttgactgtctccggggtggcggcgacgcgagtctcgcctcgcagtgtttccagcggaataccaatttgcatatcgatagatccccttgcaccggaagcccgccagatggccgaactccaggtcgtttcattagcaggacaaaacaccaatcagttaatgatgactccgcggcgcccgacgtcaggcgagcgtcaggccgccgtcgacgagaagggtctcgccaaccatataggaggccaggggagaggccaggaagatggctgccccggctatctcgtgcggcaagcccatgcggccgatgggcacgcgcgacagcgttgcatcgagccgagccggcgacgccgtggtcaccttggtcagttttgtgtccaccaggccaggggcgatgccgttgacgcgaataccttcggctgcccacgcttcacccagcgtacgggtcaagcccaccacgccggacttggatgcggcgtaagccgggtttccccgcacggaccggaagcccgcgatcgagctcagcgtaatcagcgaaccccggctctcatggagcatcggccggaacttgaccgcgcaggccatcacgctggacagattgacgtgcagcacctggtcaaaggtgaccatctcgaactcggcacgcttgtactggatcgtaccttgcgccagcaccagcacgtccaggcgttcgaaggcgggccgcacggcgttgacggccgcctggtcggaaacatccacttgcgcgtagtgcaggccagaaagatctgaaccttcgtcgaagcgatagtcggacgcccgggcacgcgtgccccaggcgtgaacctctgcaccgagttgccggaatgcctgcgcgatgccattgcctatgccgctggagccccccacaaccaacacggtcttgccggtgaaatcgagggactcggcaaaccggggctgagcgaggggagagttggaattcgtcatgattgggcgatgtagagaaatggtgtcagtaccggagtcaacgcaggacgtcccaggcgcagtagcgttccccgcttctggcatagaacaggaattcgtgatcgcgctggtccggttgacccgacgaagccgcggctgcggccccatggatgctggtcatcgcgcctgcttctgcaggtatttccaggccatcgcggccatgggtcgggcgagctttcccgtttcgagcgcctgcgccgatgacgccgtgccatccaccacccgcttcatgatcccctgcaggatgcctgcggttcggaacatgctgaacgcgagatagaagttccagttcccgccgatcctgcgcccggtgcgctgctcatacgcgcggcggtaaagcgcttcgtccgggatacccaggttggcccggtcgacacctcccatgcctcgcagcgggcccggtgaaatgtgccagctcatgcagtgataactgaaatcggccatcggatgacccagcgtcgacagctcccagtcgagcagcgagagtacgcggggctcggtcggatggaacatgaggttgtcgagccggtagtccccgtgcacgatgcagacctgctcctccgcttcctccgggattcggtcgggcagcgatgcaatcagcgcatccatcgccgggatcgattcggtttcggacagcctgtactgcctgctccatcgttcgatctggcgaaagaaataattgccgggcttaccgtagtccgcaaggccgatggccttgtagtccacgcgatgcaacgccgcgatcacgcgattcatctcgtcatagatcgccgtacgttcgctgttgctcatgccaggcagcgcgggatcccatagcacgcggccattgacgaattccatgatgtagaaggcacgaccgatgacggcttcgtcctcgcacagggcatacatcctggccacaggcacttcggtgtcggcaagcgccgccgtcacacgaaactcgcgctcgatcgcatgcgccgacggcagcagctttgccttcggcgcgggcttggcgcgcatcacgtaagcctggcgcggcgtgacgagcttgtacgttggattggactggccgccgctgaaccgctcaacggtcagcgggccggcaaagccttccacatggcgcgccatccaggcttcgagtccgcccaggtcaaaacccagtgtctcctgtgccggccgcgtgccggcgaacgctgaagaagcattgctcatccggtcgccccgttcatcgaagcgccggcacgggagccagcgaccccgcatccttttccgcgcgatccagcgcgcagtacgcgtagtacagctccacacacatgaacgaccaagtcaggcaagcgagcgaaaagaagatcaggtgttgctcgtcgtcgccggggatcgtatggaaatcatagatgcaggcaatggcttgcgcggtcagcaggaccatgaacacgccaaatgcgtgccagccttccccggcgctgagcagcttccaggcaaaccaggccaggtataccgaaaataccgaccacatcaccacatagaaatacggcctcggctgcgccagcgcgtcgatcgacaacagcacgatcgtccctgcgatcgctcccgcgaagaacacgacatccatcaggatggacggcttgtagcgatgcgtaacggacatcagcccggccaaggcaaccaccgggatgccgaagccccgggagaacgcatcgcaaaagtacgagatgccatacgaaaactgcacgccacccaaggcgaaaagcaggaaattcgacgcggagaaggtcacgatcagccattcgaagccgagcaggtagttgcgctgcctgaggaacttcaggccgtggatcaatgacgtcatcacgaggacgaacatcgcaaaacagagaagatagagattgcggtccatcacgactcccaaggctcgatttgcaggattggattgttcacggctttcgcggcgccagactggcgaggtaggtggccatcgccttgcggtcctccggcgacgccgccgcggccacgcttttcatcatcccggtcggttcgccgcgcgtgccggtggcaaacgcatcaaactgcgccagcagatactcgtagccctggcccgcgaggcgcgggaactggtcgtgccccatcagctggctgccatggcacgcggcgcagtttcccgaggccaccagccgcttgcccttctccagcaatcccgcatcgggcgtgaagtaacggttggcgccggccggctgcctggcgaagtggccggcaagatcgttgatctctgcctcactcatcgtcttggccaacgggcccatgatcggattggaccgctccccgctggcgaacttgcgaagctgggccgccacgtacggtgccggctggcccgcgaggctcggatagccctggtgcagcgaattgcccttggcaccgtggcagccgatgcaggcgtcggtcacgcgtggccacgggctgccgtcggcgttataagcggcagccgacgccgtgatatagcggtcgaggcgatagatccccaggaggtcgtggccgaaccaggcgagcagcccggcggcagcgatagcgggaacgcccagccatatgcgcttcttcatttccgtctcctaggcgcgacgcaaggcattgagaacctggagggcggcctgatggccagagcgcacggcgccatccatgtagccggcccagatctcggccgtctcggtgcccgaccagataagcctgccgcagggcggccgcaatgcctcgccgtgggtgctccagaagcccggcggaatcgcggagacacaggtgatcgtccagggatcggcacggccccagtcgtgatcgtggtatgacaccggcgccaaggcttcgctgccgaaggcctgcgcatagatctctgacaggaacctctgcgccgccttgtgatccgagggaaccgacgcattcgagatgaaggcattgataacgccgagctcgccccccggcggcgagttgtcgaaggcccacagaatgggcccgtcgacctggaagatgtgtccgttcagtcccttgtcgcgccagaacggacgggaatagaccatcgccgtcttccgcgccggcgaatgggcgggccaggcgcgctgcagcgctgcacgcttctgcggcagcggcggatcgaactgcaactgctggcacaagggtggactcagtgccatgatgacctggcgcgcgcgcacttcgccctggtccgtgtgcagcgtgacgacctcgcggtcccagttcgagatccgccggacggggctcgacaggcgcaccctcttccccaatgcctgcgccatcctgacgcagaggatctgcgaaccaccggcaaatcgcgtttcctgggcgctgtgcttgatgctgtccagctgcatatagtcgcaggcggccgagttgatcattgacaggaaatggagcatccccatttttgccggcatcacgccaccggaaagcgcgatgctcgcattccaccccgttcggtcctcgggcttgatgttctgcttcgccagccagtcgccgaccgacagtttgtccagttccacgaccttcggtgatttccacggcgcgcccgacggcacgtcgcgcgaaagcacgctgagcctgccaccgatcgcctcgtcgctgccgaatgtgcccttcaggtcgacctccagacgaccgtcaccgccgaggatgaccgtgttccccttgtagtagctgggaaacgtgcccacatcgagttcgcgcgccagatcggccaccgccgtctggccggggccgatccactgtcccccgacttcggacacctgtcccgaacccacatcgtagttaagcgtccgcccgcccacgcgattgcgcgcttccagcacgacaaaggactcgcagcctgcctggcgcaggtccctcgcggcggtcaggcccgccaggcccgcgccgatgatggcgacgtcgaggacgtcttcgggcgtgccggctttggccgccgccttggccggccccgggctcaagccgatggttcctgccgccgtggaggcgccggccattttcagcaattgccttcgctgcgtgttgattgaagtgtccgaggacgaaatcttgcccatagtgcttcgctgtttcctgtcatctcattgcgggtcgagcgcaaacctgcgaacgctcttcccgcttctcatgcttctgtgccggacagcccagacgagcccacgcagcgcctgttgatcgacttgttggactgcggctgtacactgctccagcacctcctgctccgggaacagcatgagttcggccgcgctccccaatacgagcgcgatatcgaatggcgagcctgtcgcgagcgcgtgccgcagaaggctcgacaagcggcgttcgatggcggcaccgtccgcggcgtccattcgaatccttgcgaccgatgcccggatgaagtggagcagctcactggagccaggctgatgcccgaaggcggtcgtggtcgagcaggagcttgacgtcatcgcggctttcccatgcaaatggctgattggtctggcgcgctccagccgcctgcagcgacggccggtatcccgcgcttgaccgggcgcctactcccgcgcccacccattctggtagaggcgcccggccagcacgcccaaccgcgacgtgagcacgtagttctcgccgtcctcgatcagcgccgagcgcgcgtcgcggaacaacttctcgatcgggaactcgcgcgtcgtgccgttgccgccgaagagctgaaatgcctcgtgcgtgatcttcatggcctcctcggttacgctgaccttggcctgcgcggtcgcataagggtggctctgcggagacagtcgcgcgaacgccaggctgcgccgggcgatggcccgtgccatctcgagccggcgcagcatctcgcccacgcgcaactgggtcatctggtgttccagcagcagcgccccgccctgcttgcgctcatggcaataggcaagcgcaagttcgaacgcggcgcgggccgcaccgacaaagacctggcacatgtgagtacctgcgaacgaccatgtagaagccaggtttccgaggtactcatccttcagcgcgatggcgaagcgcttgggcaccctgacgttatcaaaatagatctcgccctggggcaacgcacgctggccgatcttgtccagcggtttgccgcgcgaaatgccaggcaggtcgagcggcaggatcaggccgatgccgttggtgaacgcgccgtgctcatccgtcccgtggaacccgtcgccatagtccgccgccatgtaggcgagcgccacctgtgccaccgacccgttcgacacccatgccgagctctgcccgttgatgacgatctcgtcggcaccgaccctggcggtcacgttgccaaccggctgctttccgcctgcgctcagctcttcgcggtagaggatcgcggcatcggagccacggtcaggctgcgtattcatccagcaaccgatctttccagtgcacatctcgatcagttcctgattgccgagcgactgcgccatcgtcagcggcatggtcgcagcgccgagcgaaacggccagacccgaatccccccagcccagctcttcgccgatcagggactcgatgcgcaccgcgacctccggcgggaactgcgcgatgagttgcggatcgagcccgagcttcgcgctctccatcatcgccgtccagtacggagaacccgcagcgatgacgtcctcgggcgccatgcggtcaagctccctgccgatcggccgcagcacatcgcgcgcaaagcgatgaaccgtctgctgaatcgcgttttcctcttcgctcagcggcgtctcgaatccggtcaggccaactaccggcaacgccgcggtcttgtgcaatcgaatcattctgagtctcctcctgtcatggaagcatgcgtggcggcttgccgcagatacggcacgcccatcgctcatcgtgttagaacacgataccaaacataggtcatgttgccaaacatacaagcgaaaaaaaagacagggtattccctgtctcctggcgttggcacgcagtagcgttgctttgtcgccgctagccggccatttcggttgaccgctccttgaatatgatctgctcgacagcggtccgatatgccgcatcgagcccgcgcgagtcacgcttgcgacgccccgcgccgacctgcagcgccagtccgtcggccagcgcaatcagcaacgaggcagcgtgcaggctgtctgccgttttcagttccggattgatcgcccgcaccagttccgcaatgccgcgcgtcagcgtgtcataccactcctcaaacatccgcgcgcactcgggatcggtcgatgccagcgaaacgaagtgccaccacagcgccgagtccttgacattcctcgcgtcgctgagcgccttatccagcagtgcgttgagcgactcgcgcggcgtgacgcggctgtccagcgcgcgcttcaggtcttcgagataggcgtcgataatcggcgccatgatcgcccgcaggacggcctgccgggtgggaaagtagtactggagattgctgatgctaatcccggcgccgagggcgacggcacgcagcgagaattccaggctgccgccctcgagcaacagctttctggcaacgcgaacgatggcattgcgcgtgcgcaagccctgggctcgcaagctgtcggggtcggctcctgtggcggctgcgctcgatgcacgccgcttcctgggggtgcgctgctccatgggcactgtcatcctgtctgccttgattcagggcttttcagccctttgtaaggaatcgcgccagcggtaggctgggcgggcatcattatatctgacgcccgtcgacgcgcgtggcgcccgggtcgcttcggcgggggcttacctcctttgtcctgattgcgacggcaatgatcggcgaggcctacgaccgcgctgcgtagcgtgccttgcggttcacccgatcgtccatcatgttggccacgcccagcgcggaattgacggcgcaccattgcagcggttcgggcagcgtcgacggcgtcctgtggtgcaacgccgagagtagcggatgctccgcgccacgtatccgttcggccagcagcagtcccatcaacgactgggtacctacgccatgcccggaacacccggcggtataaaggatgttgcggtcagcacccgccgcgccgaccacgggcagcgcatcgtaggcaaggctgatgtacccgctccagcatgaccggatggcgacccctcccagcatgggaaaccgctcatgcagcgccctggccagggcacggtaggacgcttcgtccggcacgttcggtgtctgcgcaccatagatgtagcgcaaccgcttcgtcgtcagaacaagcgtattgcgcgccgtcagccgatggctttccatggtccagtgcgacgtcacgatgccttcgcgccgtggccagccaagcgacgccagttgcgccgaggacaatggctcagtctcgattgccgacacccgcagcggcattaccttgttccgcagcaagccaagttgcggcgtataggcgttggttgcaagcaccaggaacggcgcgctcgcgctgcccttcgcggtccgcacccggacggtgggaccttcgtcccaggacagcaccggcgtgttctcatagagcttcacgcccgcgcgcagcgccgcgcgccgcagccccagaacatacttgccgggatcgagcgtaccgccacgagggacatgacatccgaacaggaacgccggcgggatgccccgtgcccgcatcgcggcgtagtccagaaactccccgggagagccaagttgcacgccggtacgcatgctcttgcgcagcttcctttcctgggacggatggacgcccgcgcggatgatgcccgaggcgttgtagtcgcagtcgatcgcgtactctgcaagcttgcgctccacgtagtcgacgccttcatcgtagaagcgcacgatttccctggcctgctggtgtcccacgcgcttgagaaacaggtcgtactccaacccctgcccacccgcaagatagcccgcgttgcgcccgctcgcgccgaacccggcgaactcgcgttcgaggacgatcacctttgccccgcgcgcggcaagctccagcgcggtggacagtccggcaaagccgcccccggcaacgaccacatccgcgctgacgtcaccgtcgagttgcggctgcaggtcatctggccgctccacccagcctccaagtggccgatacgcctgtccgccttgccagttgaacccgtccatatctgcctccctcactccttgctcaaaatatggattgcaagcgcagcctcttcgacgccctgcaagccgccaccgttctcctgaatcgcgtgacgcgcgccgcctacctgccgcgcccctgcttctccacgcagttgggtgaccagttcgtagagctggccgatacctgtcgcacccagtggatggcccttggattcaaggccgccagacgtgttgatcggaatgcgcccgccgagtgtaaattccccgcgctccgcagccggcccaccctcccccagcggcaccagcccaaggttttcggcctggatgatctcgcccatcgccgaggcatcgtgtacctcggccacgtcgatatcctcagagcccaggccggcctgctcataagcctgaagcgcggcgaggcggccgatgttcttctccggctcgtcgatgcgccgatgcgaaaagctgcggatcacgctcgccgcgatccggatgcaacgactgcgatcggcgccgatgcgccgcagaccctcttccgtgcagaggattgccgccgctgcaccgtccgagaccggcgcgcacatcggcagcgtgatcggataggtgatcggcggcgcggcgagcacctcttcgaccgtaaaagcctggcggaactgcgaatgcgggttgtgcaccgaatgcccgtgattcttcgccgatatagccgcaatctggcgctgtgtcgtgccgtaggtcttcatgtgataccggcacagggcggcatagatcttcatgaagcggctatagggccggtcggattccgatcccggcggcggctcgatgccttcccccagcttcgccagcgtcgcgaagttttcctcgacgcgggatacgtcccatcccgcgtcgaacaaggcgaacgacctcgacttgtcagcgacgttcatcttctccgcgccaagtgccagcgcgacgtcgcagctgcctgccctgaggtgctgtactgcaaggtgcaccgccgtgctgccggacgcgcaggcattttcgacgttgaacacaggaatgccttcgataccgaccttgctgaatacgacctggccagggatcgacaactgcccctgaagctggccattggtgatgccggcgtagaaggccgcaccgatggcgtcggcactacagccggcgtcctgcaaggcgccgcgtagcgcggcaccggcgagtccctcgatgctcatgtcgaaatgccggccgaagatggtcattgcgatgccggcgatgtaaatgttgctcatgtcttctttcctgggtgcctcgttcagatcttgcgttgctgtccttgccagtactgttctctcagatccttcttcaacaccttcccgaccgggcttcgcggcagtgcggcgacgaattccacgctcttcggcgctttgaccgagccgagcttctgtttgcaaagggcaacgagctcgtcggcgcttacctcgtagcccgcattgagttccaccacggctttcaccgcctcgccccacttctcgtccggcacgccgatcaccgcgcagtcctgcacagccggatgggaccagatcacctgctcgatttcactcggatagacgttgaagccgccgctgatgatcatgtccttcttgcggtcggtgatatggaggtagccctccgcatcgaggtgtccgatgtcgccggtatgcagccagccgtcgacgatcgcctccgcagtcttgtcgggcgccttgtagtagcccttcatgacgaggtcgccgcgcacgcagatctcgccggtctcgccttgcggcagaacctcgccgtgctcgcccatgatctccacacggatgagcgggttgggacggccgaccgaggatagccgttcgtcggacgccagttcgccgccgacaaaatgctcggccggcgtcaggtaggagatcgacgccggggcctcggtttgaccgtagccgccggccatgatcgggccaaacacctcgatagagcgcttgagcttctctaccgacatgggcgcagcaccataaaggaagtacttgagcgatgagaaatcctgtttcccgatcccgggaatgtccagcaaccggtagatcaccgtcggcggcaggaagagctccgtgacccggtgcttcgcaatcgcaccgatcaacgctgccgggtccggcttcggcagcacgaccaccgtaccgccgcgcgcagtgcagggcagcgacagcatcccggcggtatgcgtcatcggcgcggcggcgagattcaccgggcgttcgtccccctggtaggggaacgccatcatgaactgcgcgaagtacgcctggtaagcgcggtgcgcgttcattacgcccttgggtgctccggtcgtcccgcccgttgccgaaagggtcacgacatcgtccatgtcgtaatcgatgagcggcgcgctcgaggcctggccctcgctccaagtagacagcgacggcgcccacggcagcgcggcatcgatacacacccagagcctgaccttcggcagtcggggacgcagcgtctcgattaccgatgcgaacgcttcctggaagaacagcacttcgcagtcgaatgcgtcaagaatgaactggttctcctccggcgcgttgcgcccgttgacggggatgtacgccatccccgctcgccatagccccagcgcacaactccaggcagtcacgtcgttatctgcccagaccgctcccttggtttccctgccgaagccttccgccagcaacccgttggcgatgcggcaggaaagctcgccaatctcccggaacgagtagctgcgctcgccctggatataggcaatgccgcggggattgatgcgcaacccgcggtcaaaataatcaatgattgccatttcaagtagtcctcagaatctgtgacggttcggccgggttgcggtgcgagccgtccgtgtacgggtcaaagcggccggtgcatttttcccgccccgggcctgaagagcaggccggggcggcacggcaattacagatgcgaaaccgtcgcacgagccagcccgcgctgctcgaggaagccgagcaggtagcggtgtccgaaggccttcgagccggatgcgaagccgacctttgcggtgtcgccgtcgagtagtttgatgacgcctgccgtctggatagccccggtggcgatgtatggcgtggtcccatgcacggtcgcccgcaccgaagcgacctgaccgcggccgatggcgaaatcgacggtgcgctgcagcgtagtgcgttcccttggcggcatggccggcgtggtcgaatcaacgatctgcttcagcaccgcgtcctgctgctcgcggggcaggtgcttgtactctgcttcccacttcttgcccagcgcatgcactgtctgcatcgcgttgttgtcgtaaaaaccgacactggagatgcagctgcgtacgcgcggatcgttttcgaagtagaccggcagcgacgtaccgccccacggcagacagaacaccggttgcatgaaggcaggatcgaccacattgaacgacgcatccgccgcatatggcaccagcttcttctcccagaggtagcaagcctcgtggcgatagccttcaaagatcgtcgcggtcgaacccacgctcacgccggcaccgccgctacgcgggccgcgcgccaacgtcgcggtttccagggcatcgacgccgggtgtctccagcgccagctccgcggcaatctcggcgaacgtgtacatgtaggcattggacggcgacagcagcagcccggcctgccggtacaggtcgccgaattgatcgcgcgcccggcggatgtgcggctgctcgcccgtggtgtcgaggtaatggcatcccgccttgagcgccgcttcgacgccaacgagcccgaccgtggagaatggcccgacggtgttgcataccaccctcgcgccgcggaatgcattcaccagggcatcgacgtcatgttccgcctcgatgagttcatagtttgccgattccaggcgcacgacacgctgtgccatcatttccttcgcccggcctgcgttgcgcgccacggccgtaaaagggatgccctggtcgatcagccagtccatgatcaacatgccggtgtagccgcttgcgccatagacgacgacggggtgctttgccatggtttgtctccttgagaattgtgtctgacaagtgattgggttggaaggaatgccgccctatgaagggacgactggacaatacttttgggtgcctatcgcctgtccgggccgtcgtcctgcaacggacccgccattgacatcagcagcggccgcgaaccgttcgctagcactgcagtcagggactcctgccctgcgcgctgcgtaaccgagaacgtcttgccgccgtccttgctgtcgagtacggtcccggccatgccgacgacgacgatgcggccgtcagcaagctccgcgatcccggtcagcgattgggtggtatgcgagtccacgcgctgccatgtcttaccgtcgtcgctgctgcggtacaggtgtcctcgcatgccgcagaccagaagagagccgtcgggaagtgagtgcccgtaccacagcgagccgttgtcgccagtggtcgacgcctgccacgacttgcctctgtcggcggagcggaagatggtgccgccttcgccagcgatgaagagcgatccgcggccggatccgaacatgtgcagtaggtgacggtccgcgttttcacccgcctccaccttgatctcggaccaggtccggccggcatcgcgtgtttcgatagcccagccgtacagccctacggcgatgccatgctccggactgtcgaagtagagcgaaaggatcggctgctctgcgccccgctcggcacgcaagagcatccacgtctcgccgccatcctgtgtgccaagcacaacgccatcgtgccccgccgcatagccgcgccgcgcatcgatgaactgaacggaagtcagcagcgagcggaccggcaccatccttgcttgccggaacttgatgccgtcatcagaaaggaggatgacgccgtggtcgccgacggcgaccacgcggttgccggcacgcgcagacgccagcagcggtgcggcgaccgcattggacacctgccgggccggctccagggtcggccacggagctgcggcagcggtctccaccgcccgcgacgggcacaccacgcccaaggcgatcgcgacaacaggtaaaaatcggtgcaggttcatgggagattgacgcctacttgcgtctcagtgcttcaggatttccggcatgcgcactgggccgcgccggggaaagaacttctccagcaccgccgcgaacgcgggcaggagggtgatggccatgaccatgttgacgaggaacatgaaggtcagcagagctcccatgtcggcctggaatttaaggctcgagaacatccaggtcgccacaccgaccgagagcgtaatggccgtgaacacggtcgccagccctgtctccttcagcgcgaccgcaagcgcgtcggtgaacgcaagaccgtttgccagttgtacctgcaggcggttgtagatgtagaaggcgtagtccacgccgatgccgaccgcgagcaccatcaccggcagcgtcgccacggtcaggccgatctcaagctccttcatgaaccagtagccaatccacgtggccacggtcagcggcaggcagcacgcaaccatcgcccgccagtcccgatacacaaggaagaccagaatgaggatggcggcgtagacgtacagcatcatcggcaactcgctggcctccagcacttcattcgtggctgcctggacgccagcattgccgcttgccagcctgaccgtgacgccatcaagccggttggactcgcggaactgcttgaccgccgccaccacggtcttgatcgtcgtggcgcggtgatcgggcagataaaggttgacgccttgtactcggcagtcgctcgacgaaagcccggcgatgcggttgttcacgccctggaactgcgagccgagcccgcgggggtcccgcgtcacggtggccatcttcggactgccttcgttcatgccggcgttgtagagtttgagctgggcggccagcgaatcggtggacaccacgccgggtacgctgcccatgcgccaggcgaagtcgtcgacgaacaggaactcgtcggcgcgggagcaaacctcgccatggcgatcgggcgtggcctcgaacaccacggtgagccagtccaggccgacgtcgaagcggctgacgatcgcggcgacgtccaggttgtagcgggaatccgcgcgcaattccggcgccccggcctggagactgcccacgtgcctgtcctggctctgccagaacgcaaggccgaaaaccactgcgccggcgacggtcacgatcagtgcgttccgcggctgggcgatccgggccaccgcccccagccatccgctatgactctcgcgccgcgccagcgcccgtttcgcgaactcaggcgtgaaccggaagtacgacgccgccaccggcaacatcatcaggttggtgacgatcttgtagcccacgccgatggccgcggtgatcgccagttctcggatcatcgggatcgggatgagaataagcgtgacgaagctcaccagcgcggtgatcagcgccagcgatccgggaatcagcaggccggtgaagctgcgccgggcggcaatggcggagtcggtaccctgggcgacctcgcggacgataaagttgatctgctggataccgtgtgagacaccgatcgcgaacaccaggaacggcaccaggatggcgagcgggtcaagcccatagcccagcaggtgcagcgtgccgaactgccagaccaaggacacgagcgagcagccgagcggcagcagggtcaggcgcaccgaccggcagtaccagtagaccgccagcccggtgagcaggaaggcgatgccgaagaagcgcgtcacgtccgctccgcggtcggcaatgtcgccgatctgcttggcgaagccgatgatctcgatctcgacctggtcgttctcgaacgggcgccggatcttttcctcgagcagccggttgaactggatatagtcgagcttcttgcccgtgcggggatcgacgtcggccagttcggcggtgatcagggcgctggactggtcgcgtgcgaccagggtcccgacatggccgccggccatggtgcgctgacgcatcttgccgatgacatcggcggagagcttttccggcacgatatccccgcctgccaccgcctctgcccggaagccgtcctcggtgatctcggtgaagaagacattcggtgtccacagcgacgtcacgctggtgcgatctacgcccggaagataggtgacggcctcggtcaccttgaggacctgcgtaagcgccgccgcattccagacatcgcccttgcgggcatgcacggcaatggtcagccggttggcaccgaagagcttgtcgcggaactgctcgaaggtcttgatgtactcgtggccttgcggcaactgcttctcgaagccggcttcgaggtgcagcttcgcgccgagcacgcccatcaaggcggtgaatcctgccagtgcgagcaggaaaggaaggcggtgcccgaacagggccgcttccagacgggttatcaagcgtgaaagcattagaaggaggtggtcatgctgagggagacaaaatcgcggtcgcgcagcaggttgctgccgctaccgccccagttgtgcgtgtagtcgaggcgcatctttgtctccggcttcgtcttgaagtcgagggtcgcgccgatcactgcggcgcccgcgccccggatgaagccaggcagcgccgtggccgaatagcctccgatgccttgcatgacggcgatgtccggtgacagcgatgcccgcgtgccgaagatgttgggataggtcaccgaggctgccagcaccatccccgccgacaacttggtgggcagcgtgtagtcggcggtgaccgcatacggaatcccggcgttgagcctgagcttcgggtaatacgccagcgcaccttccgcggtgatcgtgccttcggacgcgcccaacgcgcgcagcagccagccaaacgagcccgaaggcgacatgatgtggatgccggtcaggtggagctgatagtgctgcgtgtcgatcgccccgcggcaactgcttccgaccggcttgaccgcaaaatcggccagggcgttgcagtagtaggggttggccggatcgatgaccgtggtcggatcgatggcgacgctgtcccgcggacggtacgacagctcggtgccgatcgcccattcgccaacctggaagttgtacgagaggccgaacaggtcgcggttcttgccgtagtcgagggacgcctgccagccgaacgggttgctcgtcgtgttgaccacctggtagctcacgaacggcaccttctcgctgtagtggtagtaatagaggccgagttcgttgccgctgtcggggaacttgtagcgcatcgccatcccaccttgcccgttgttgctcggattgttgtccgggccgcgcgggatgaaggtgccggttccgaccaggggcccgaccggattggtattggggttcgccagctccccggtgctcaggcggcggttgtagggcatcccggtcgcgggattgatgccgacgatccgggtccccgtgtcgccgatcgtgccggtgggaagcggggccagccccgacgcagccagcgcgccattgacggctgaagtcgggatatagaagccccgtccgcccttgccgaggaagtcgctggtcgaaaagaaggtcccgggcgcgtcgaacttgaagctgttccacttccactggtagaaggcctccaggccgaggtccttgccgagtgaagtgctcgcagagaccatgggcgcggggatgaacagatttttaagcggcgttcccggctggtgcgcggacggcaggtagatcgcgttgatcgcgttgataccgcccgggatgtagaggttttcaccccagttcagcacctggttgccgacccggacacgcgcctgctggtcgccgacgtcgaattccttggtgatgtaggcgtcgagcagacgcgggtcgctggtggcgaagtttcgcgcatccgagtcgagatcggttcgtctggtgtgggcggtcgcaaagtcatagttgacgacgccgcgcaccagcccgctccacccgttggtgcccttgacatagaggtcgctggtccactgcgcattggccgaaaccggctgccagcgcttgtagttcaggttgccgtcgtcctgattcaggcgcagcgtatccaggttcgacgagaagacagacgggttacttttctgcagcggcgtaggcgcgtcgccgacacagccgccgttgtcgttgccgacaaagctgcagttcgttttcgacgttctcatcgctgcaccaaacgaaaccgtcgagtcgaaggctaccgcccagccgttgtcgagcgtccactgtgcagcgtaagccgagccggcatccgccatcgccagcaggcctacgattaccgagcgggccagcttccgttccatccgcatccccgcggcggcttgcgccgccgctgctgcaacatcacgcagtttcatgcctgtctccccgtggttctcttttttggcttatcgtgtggtgaaccggcgcaggccgtccggctcgaaggtcttctccttcaggcgcccttccctcgcggcgagccagtcaggctccttgtggccggcgacgactcggtcgagcacggcgcggcgggtctggtggtcatagctggtattggccgcccagacgcaggccggcacttcccaggccatgtagggacccatctcggtggtgcgccagaccttgccctgcgcgtcgtacatgtcctccaccaggatcgtccacgtgtcctcgtcgatgtagaacacgcgcttggggaaggtatgccgcatgccttgcttgagcgtggcctcgaccacccacatccggtgcagctcatagcgcgtcaggtcgcggctgaggaacttcggcttgacgacttcatcgaccttgttcgccgaagagttgacccggtacgtgttgtagggcacgtacatctccttcttgccggccagcttccagtcatagcggtctagtgggccgttgaactgcatgtactggtcgacggtcagcaggttctcggtgttgagctgcggggcgtcgtactggtatgtcggcgcgcggcgcacgcggcgctggctcgcgaagtacagccagacgtcgttggcctcggagaacttgtactgcgtcagggtggcatcccccgcgatcgagggcgggctggtaaacgtgttgaggtacaggctctcgatgccgcgggcgtcgtcgacgcccttgttcgacggcgaccacatcggcgacatctgccattcctgctggccaagcggctccccaatgctgtcggtgcccttcggcgggatgtagcccgcatagctcatctggaatccctctcctttccagtgcagcttgtggttccacatggcttcggcgccgttctgcggaatcgggaacggcacggcggcgccgatcgcctcggcgaggtcctggccgttggcgccaagcttcgccgtcgttgcgttcttcttcgtccgctcgtagaagaagtcggggaaaccgcaagaacggtgggtcggataaacatccatccgataacccgggatcgtcttcaccatttcgatctgtccgggggcaagcttgtccttgtatttgtcgacattggacgcgtcgatcgaaagtacgcgcttgtcattcgcgtacgggtcggggcgcgccgtgccgggcttccagccacccggtgccttcatgtccccgccggtccactccggaatcaacccgtccttgttaccggcccgttcggcacccaccggagtgaggtccttgccgagccggcccgcgtcctgctcggaggccgcggcataggccgctccgccgaacgcaagggtcacgctgaggaacaacgtcttgtatctcatctgagtctcctgtctggcatggcaacgaagtgcctcgcttcgtgtgtttttttcggtagaacacgttaccaaacttaggtaacaatgacaaagaacaaaagaaaaaaagagctagggtattccctgcgcgtttggctgcgatgctcgcaaacgcacccggtaccgtgcgcagcggcgaaccaatggcacgaggcacggctcgcggctgctggggtggcaccggaagccgcaagccaacgctgtcagtcagaccgccgtagtgatccggcgatgccccatgccgcccgaggctgtgctggagatacacaggtcctcaaggccgcacggccgggcacaggtgttgaccgtcccggcagtgcaggcccgcctgcccagctctggaaatcgtgatccacggacttcgactgcgctcgaggcgcgcgcaggacaaccaggctcaggcgccgccgctgccagctaccgccaccgcctgaatctcgatgcacagctcgggaagcgccagctctgtcacccccaccgcagtccaggacggataacggctcggcaggtattcgtccttgaccttcgtgaaggcctcgatttcctgccgcaggttggtgtgataggtcgtcagctcgacaacatcctccaggcttgcgcctgccgcttcgaggaccgctttcagggatgcaaaggccagccgagcctgtgcctccatgccctcgccgggcttcatcgctgcgtctagcccaacctggcccgacacccagatggtgtcgcccacgcgggtcgcgggggcgaaatggtaggcgtcgtagagcggctgggtgccgggcggaatgaccggctgccgtttcatcgtcgtggttgtcatgatgtcggtatcgtttatcagatgagttggcggaagcatggcgcacggaagggatcacctgccttcagcgatgccagctcctcgacgtacagcacacccgccggcgtgaagcccgaatcgctgtggtccggcaacggactgaaaaccgcgtcatcgccgaagaagcgcaagaccagcgtatggcggtccgggaaatcggcgtcgacagcacccccgccgtgcagcgaacccgggtgcagcagcagaacatctccgggctgcgtagcccaggagaggatgtcgtaggcattgggatcgatgcggcgttcggcctcgatgtcaggcagccgcggccagaccccaccgccgtgcaacggctcggtcgggtcgtcggggttctgaaaggtgctgccgtcgtggcgcgtacccaggtacgagcccctgacgatctccagcgcattacgcttggggaccgcctcgaagctgatccacgcgttggcgaagtgctttcccccccaaggcaggtaggaggtgtcttggtgccagggcgagcgcccggcccggcctccctgcttgaggaacaactcttccgcaaagtaccagacatgtttagagccccagagatcggcgaacagctggccgaacgggagcgaggcgaccagctcatccagccgcccctttgcgaatggattggcgttatcgacgtgcgaccgttgcacggagccgtcaaacaggctatgagcgttgggccccgggttctcgatgccccagtcaaagacctgcctgcacatggctaactgttccgcgttgagacagccttcgatgaggacggcaccgtcctcatcgaaggcgctgcgcttggattcatccatggatgctctcctgattcttcattaagcccggcgcccggtcacgtgcgcttccggtcgcctcgtttgtagaacaacctaccaacattaggtcatgatgacaaagataagtcagaagtaaaagggcgggtattccctatcccacatggactctcctcgcctacgcaggaatcaacttgggctcgcgattcataattttgacttgtttgtgttgttgacctatatttgccgcgagcatgccaatcatttaacttttgtcctaacaatgcacgcgaagacacgtgaagatgcgctggaagtcgatgccgcaccggcagacatcgtgaaccgcgacacagtcgcactgacccgacgccgcctcctcggcgcggctgcggcggctagcgctgcaacgctgctggcaggcacaccacgcacagcgagtgcagcgccgcgggtgaagggcgccggcgccgcatctgcggggcgcgacgtgctcgatgtcgcgatcatcggtgccggactggcgggcctgaccgccgcacgcgacctgaaacgcggcggatgtgacacgttcgtcgtcctggaggcacgtagccgtgtcggcggccgcacctacaaccatgaccttggcaacagcgtggtctcggaagccggcgggcagtggatcgggcccggccagaccgccattgctgacctggcgcgcgagctcggcgtcgacaccttcgaaacctattaccagggcaagaccgtgttcctggccggcgacgtgcgcgtggcgcaggatctccagggcggcgtcggcgcccagggaaaggtcgccgccaaactcagcgagctggcgggccgcgtacccagcggcgccccctggacagcggcaaacgcggcggaactagacaagctgtcgctcggcgactggctggcacggcaagacttgagcaacgaggaaaaattctccttcagcctggccgcaaccctgtcgctcggcgcgcaaccggcgcaactgggactgttgcactacctgtcggtgatcaacagcgctaacagcgactacgacacacttgagaggatcaagggcggcgcccaggagacgcgcttcgtcggcggcgcgcagatcctcagcatccggatggcacgcgaacttggccacaaggtgcggctgtcctgcccggtacgcaagatcgttggctgggatcgcgacattgtcgaattgcacaccgaccagggcgtggtacgggcgcgccacgtgatcgccgcactgaatccggcgctatgccagcaggtcgtcttcgacccgccgctgcccgccggacgcgcgcaattgcatcggttctggccggcgcacgcgcccatgcgcaagacggcgcatgtctatgcacggcccttctggcgcgacaagggattcaacggacaggttgtgccgctggacggcccgctgatctggtcggtcgacaactcgccgccagacggctcggtcggcgtgatcagcgcattcgtcaagcctggcttcctgcccgccgagcccaaggctgccgaacgcatcctctcggccatctatgcccaggcgttcggggacaaggcgttgaagccgacgcaataccacgacctcgactggggcaaggtcgataactggtcgatgagttgcatcaacccgatgccggcgggcttctggacgaagctgggccagtacctgcatccgccgacagggcggctgatctggtctggcaccgagacggccgacatctgggccggcgccatggatggtgccgtgcgctccggccaccgcgccgccctgcaggtgctgggcgccctggcatacccggttcgggaggcatgaatgaaatacaagcgccctgttctcgtggcggctgcggccgtggtggcggtggccgccttcatcgtccccgacctcgtgggctatcaccggttcgggacggcactggataaccaggccgtagccagccagaccgatggtggacgctggccgcaattcccggagacctgcttcgcctgccatggcccgcgcggtcagtcccacaatgccgagtaccctgccctggccggccagccggcggcttttatcgaggcgcagttgcgcgccttcgccagcgggcagcgcgacagcccgaccatggggccgctcgccaggaacctgactgatgagcagatcgggttgctggcagcctattacgcaaagcaggcgcccacaggtagcccggatgtcacggccagcgccgcgctcgaggcgcgcggcaaggctgtggtccaggcgcgcagttgccaggcctgccatgccgaagggttgaccggaaaggacctggcaccacgcctcgccggccagggcgagagctaccttgggcaacagcttgccgcgttcaagagcggcaaacgccatgacgcgtccggcgccatggacagcattgccgccgccttgtcgaacgaagacatcccggcagtggcccgctacctggccaggatgtcgcctgaccgccgggagatcggcgcccgatagggcccgacggggcagcaagggtagtcggcaagatgcgcgggtcagacaggaggcggggaatgagccgatacacaccgtcctggctgccagccggcttggcggctgtcctcatgctttgcatggcggcagccatgggcgtggcgccgcgcagcgcctaccatgacgctggtgcgccacgccggctggaagccctgcaactgcccgacgtgcgcgaccagctcgaaaagctggcggatgccggtgcaacttacatccacgaggagcccatgcgacgcggcgacacgatcgccacgttgctcagacggctcggcgtggaagatccggacgcacagcagttcatttccagggatccggcggcgcgcacccttttcaacctccagccggatcaggtcgtccaggcggaggtcgaccaggacaagctgctggtctcgctgcgcgccctcgttgccggcaattcctccgcctcgcgcgaactgctgatccggcgggccggcgacttccagaagcccgccttcaaggcgaacttgcaggcggtcaggaacgaactgcgttacgagatgcgttccggcaccatcaccgcgaatgggttcttcaggacgatggacgccgcgaaggtgcccgacgacatcgtccggcagatgatctcgatcttctcgggcgtggtcgatttccagcacgacatcgtccaaggcgatcgctttcacattgtctatgaggcgggcttccgtgatggtgcgctggtgcgcaacggtcgcgtcgtggccgtcgaactcgtcaaccgcgcccagctctaccaggccctgtggtatgacggcgcagatggcagcaactccggtgcctactacaccttcgacggacggggcatggcgcgcccgtttctccgctcgccggtcgagttctcgcgcttgtcgtctggcttcggctggcgcaaccacccggtgcaccaccaatggatcaagcacaagggtgtcgactttgccgccccgacaggaacccgggtcttcgccacagcggacgggactgttgactttgtcggccagcagacaggctacggcaatatcgtcatcctcaagcatcctgacggctactcgacgtactatgcgcacctgtctggcttcgctggcatccagcccggccagcgcatcacgcaggggcaactgatcgcgtatatcggacagactggctgggcgaccggaccgcatctgcactacgagcttcgcttcaatgacgtgccgcagaacccactgagcgtcatgctgatgaaacccgtcacgctgtccggacgcgcacgccagggcttcctgagccatgccagcgacatgttgagccgtatccatgtcctgcgcggcattgaagtggcatccagcctcggctgagccgccccaagtggcgcactgtcgactcgcgagttgaccggggacttccccgcgcatgccggtttgcgccggcagtggctgcgagtatgctttccttcatgacgcggattccggccggcctgccatcgcctcttgcgtgcagacgccagaccgccgactgcgggggcagatcatgcgcaggcagcctcatgacggatcgggaaaggatcgaccttccgccctcgacttcagggagggcgagccgcacttcaggctgctcgccgacggcatccctcacatgatcatgaccgccgatgcggatggccggatcgattactgcaaccgacggtggacgagctataccggcctcagtcttgagcagactcggtccggcgcctggaaatcggccgtccaccccgaggactacgcgcgcaatatcggccactgggcagacgcagtggcgagaggctgcgagtacgaaatcgaatatcgcctgaaacgggcatccgatggcgcctaccgatggcacctcgaacgcgggtcaccattgaaggatgctgatggcaagatcgtaaagtggcttgcatccggcaccgacatcgaagcgctgaagcaggcccaggcctctgctgaaagtgccaaccatgcgaagtcggagttcctgtcaagcatgagtcatgaattgcgcaatccgctgaacgccatccttggcttcgcgcagctgatggcctctgaggctccgcctccgactgcgtcgcagcaggccagcatcgaccagatcctgaaggcgggctggcatttgctggagctcatcaacgaagtccttgacctggccaggatagaagccggtcaggcgtcgctgtcccctgagccggtatcggtcatcgacaccttgcacgagtgccaggcaatgcttgagcagcaagcactgaaacgctcggtccgcatgcggtttcccgcagtcgaaccaccctgcttcgtccgtgccgacaggacccgcttgaagcaaatcctcctcaacctgctttccaatgccatcaagtacaaccgggaccaaggctcagtcgatgtgcaggtgacgacgacgggacatcgcgtaggcgtcagcgtgcgcgacactggagtagggttgacaccggaacggctggcccagctattccagccgttcaaccgcctggggcatgaggcaggccccgtggaaggcaccggcatcggcctcgtggtggccaagcggctggccgagttgatgggaggaaccatcagcgccaaaagcacgcctggcgtgggcagcgtgttccgggtcgaactgcctgctgccgcgcctcccgcaatggctggcgagagcacggaggccgccgcacctgtccggtcgccaatcgaagccccgtccacgatgcacaccttgctgtatgtcgaagacaaccccgccaaccttaagctcctggagcaactcctcgcccgccgggcagacgtgcatttgctgtcggcggccaccgggattctcggagtcgagctcgcgcgcacttcgctgcccgatgcgatagtgatggatatccatctgccggacatcaatggcatcgaagcactgggacgcctgcgcgaagacccgatgacaatgcatattccggtcatcgcgctcagtgccaatgccatgccacgcgacatcgagcggggcatgaaggcaggattcttccggtacctgaccaagcccatcaggatccacgaattcatggatgcactgaacgccgcactggaacaaccgcgaggatcaattgcgcagggctagcaccgagtcccgcgaactggcttgccatgatccacccatcggacatcctggctgcaaaaatcctggtcgttgacgatctggaggccaatgtcctgctgctcgaaaggatgctgcatgcggccggatataccagcgtcgaatcaaccaccgatccgcgcatggtttccgagcttcacggcaggaaccactatgacctgatcgtgctggatctccagatgcctggcatggacgggttcgaggtcatggagaatctcaaggtcgtccagccggacagctaccttccggtgatcgttgtcaccgcccaacccgatcacaaactgcgcgcactgcaggccggcgcgaaggactttgtcagcaagccattcgatctcggcgaggtactgatgcgggtgcggaacatgctggaggtacgcctgctgcacagtgagtccttgcagtacggcaaggaactcgagcgcaaggtgcaggaactggaagcgagccgggagacgatagtccgtcagagcgatgagctcaggcgcctttacgaaaagcttgtttgcgagcaacaggtcactgagcgtcttctgctaaacgtgttgccagctccgatcgccgaacgtctgaaacagcgttcccatcctttatccgccggccctccggacgtcatcgccgacaggttcgagtcggtgtcagtactgtttgcagatattgtgcatttcacccgcttcgctcccggcatgagcccagaactactagtggaggtactaaacgagatatttgccgcctttgatgaaatcgccgacggccggggactcgagaagatcaagacaatcggcgacgcatacatggcggccgccggtttgccgataccggtggcggatcatgccgttcgggccgcccatatggcattagacatgatggagtcgctgagccgattcaatcagcgaagcggctacgcgctgcggttgcggattggcatccatagcggggccgtcgtagccggggtgattgggaggcgaaagttcatctatgacttgtggggtgataccgtgaacatcgcgagccggatggagtctcagggcatagtcggcggcattcaagtaactgacgacactcgacagcaacttggaaaaaccttcctactcgaagaccacggggtgattgcagcaagaggcatcggagacgtgcatacatggcatctggttgggagaaactagacagcgacgtccctgggacagtaagacagtctcggtctggacgtgctcagtcaagccaggacactattcagaaaatctcccacacgcgtggagaccacgcgtgcgccccaaccgacgacgcgaagcaaaccattgccagggtacccatgcccccgaaattttgcccagctcacttaacttcgatcttcgtaatggtagtgggcgacgagcccaacttgggcaggcacagcgtcaataggcgccgttcaaatcgagcatcaatgtgctcgacgacgcatcggacgagtcttaatggccgaactcgaaccggcctaagcattgaacgcctgggcagcgagacgcaattctgggcccacgccaggaacccatgtccgcggcgcgacgcgagcgatctccctatccgtatgaccgcgacgagagcaaccggaggaagctatgctctagtttttcccgtcccaaaatgcgctgcggttccatttgcagcagcgatgcggatcgttgcgttcctattttggctggccatcccccaaagcgatggtctacagcgacccgcgctacgcgcttttgctagcgagagtgcagatgcgccatctcgcagtcgggcgcgagtcactctacaccagggtgccgacatctgttgatatgtcgcgttagtgcacagacgtcgcgggcaggagttgcaaggtgccgaatcggttgtaaaacattgagccttcgggggctactgtagattcaacgatccggacgcgagagctgtaagatttcgtgccgaccatcatggtttcaccgactttcaccttcacctccttcacgaccaaatgccaagcgaaagcgccggcgacggttgtgcagtcggggatgttagacgggacactcacgcccttcagtccaaaattttgcatgccactgcagtgagcgccactacctccagcatctacggtggcgacgaatgcccgaaaaatgccatcgatgccgtcattggccagcgccagccagttctgtgagggatgggctacgccggcgttctccacatacacgcctagtgcgccggcccggaccacggcgctcgcagcgcccatcacatgtgccatgcgctgccgacttccgccggcgtccgcaaggaggacatgagaggtatgccgagcgatggcccgcatgtcatcggagtcgtaccaataggtaccgccacatcgaaagtcctccacaatgctcgagttgtgccccttttgaaagtggatgtggacgccctggcgggttcgctgatccacgagcacgccattggcaaagcgatagtttggcgcctgcttcttaatggccgccttgaattcgacgagcgatgaccaggtacccggaaggataagaactgcgagattttgcatgcaacgaatggcttggaggtgaatgcgccgaggccgtgacgtcggcgcgaagcaggaccttctcggtcctatggggttaagtgaatccacgcgatagttgttggcttggcagctgcgtgggcgcgtggtggtgcgaggcatgcggatctaattacaagccgatttccatttgatccagtccgcgctgcagggcatcggtcagccagcccatgaacgcacaccatccgtcatgcgaaagcgccagcccgtcgctgccatggatcagtctccggcgcactatcgagctgccagcgcagccatcgcctgatcagcgtttccaactcgaatgggacgtcagtcaaatagatataccgttcttggtcttgcacaatggttttcagtccagccggcagccaatgcgccagggcgcgccctgcctgctcggcagtcgggatgcgctcgacgttgcgcaggatcccctgcgtgcgaagaaattggcgctcgaggatttcgcaactcaccctgagccgtcgattcgccccatgcaacggttccagcggatattgatgagcgagcttgaccacatcaaaaaggggcggacgtgcgaggatattgggaatctctgcgggggtaccacgcaattgtcggctagatcgaaggtgcgcccccgcgtgaaacccatttctcggaacacgaacttttcggtcatggccctcccccggcgggttcgagccgcgttaaatggcctcgcgcgtcagcacgacgccctgcggttcgttctgcgagctatgcatggtgcgcttgacgggggccacgacgctgagcgccatgccgaccaattgcatggggcgaacgaggtcgcgctccacattgtccagcgacgcaatagtccggaaggttgagcactgcgctgggatgcgtgcatcgaactcgtccatgacgatgcgataggcgccggtggtcagggattcgcccaacacattgtcgatctcgatccgcccaagtgttcggcagtattcctcctggccgtctggaataagttccacggtaacgcgtagcatcggttttagctcccgagcagggctttagcggtcatgcgttgcagccgctgcgccagttcggactgcgcagacgcgctcgagaggcccagcacgccatccgtctcgaccaagtagtcgcgcagctcggcgggccaatcctcgctgtcgtcatcgacggccagccagtgttcggcccgcagcccggcccgcgcaatgtagcgtgcgatctgggcataccgcgagagctcgttgaaccaactcgcgtctacgcgatgagcgccttcatgatgctgcgccattgccgaatgccaagtcgcgccgatgacacgtgcttgcagcgcagccggcagataggcacgtgcgcgactgaagcttttgaggacccgaacccacgacgtagaaaggacaatacggacctgagggtacggcgcgagaatttcctcgagaatcggcgcccacatgaacagcgttccagccgcgcgaagctcggggcgcccgttcaccaagtaagcggcgtctggatgcaagacaccgtcatagtccaaaaacaaaatcatcgccttcttggcctttgtctgttacgcagtgatgcagggcagcattggtcccacaggtgcacctacaaaccatggcattatagatttataaacagtagatgtatatccagtagagttgcatgtgtgtagatttttagccttggtttgcgcactctgcgccccatgtcaaagagtgctgaaaagacctacgcgcggcttagggttgcctccaacctacggaaggcaagggaggctgcgggcctatctcaggaagacttagccatcaaggcaggattccatcggacctatgtcagtcagatcgagcgcgcggtgaacaacgcaacaattgacaatatctgcaggcttgcggaatttctcggggtcgatgttcacgagttgttcatcgaccctcaccagtagtagttcccacttcgttcagcgcctggtgtaccgcggccctttggttcggttccgccactttcgcgttgccagggcaaaccggcaaacagtacgtccctgcgacgctcctcctttttcaacagttcgcccttcgctttatctgctccccgacctcttttggcgagaattcaagggttgcagggtacggtgcggcggcaccgtctcttggtaagggtcttcgtcaacaaactaaagcaggggtgttggatgcgctcgcatgacggtatgctcatgcctgtctacggaccaggcagcgcgtcagcatggctcgaattccccagctggatggctgtattggcagtgtccgatagcgggcgtgtggaactgagcaactgctccggtgcactgtcatagcatccggtgcgttcgcctgaacttgccgcttcgccaacgcgaccagcggctgctcgctgattcggtgccgggctatgcattgcggcagttcagtgaggaagtggcgaagatgcgaatacggtccggctcggagagttggcaggattcatcagcgtatattcccactcagatcggactcctgactccgcctggagttcttcccagccgcccttgtggatgggtatcttgcaaatgatacccttggcacgatgtgcttccagttcattaaacgagattatcatggcctgcgcacttggcggttctggggaggaatcgaagctcgtcttcaggctcagggtgaacacagatacctactagcctgattcgtgaagtgggcgagcgctctgcaattggatgggcatgcaatcgagctacggttctccaaggacagcgtacaagtatgtcgtgggacctagctttgagaatcccccccaacgatgcgggcaattttttgcttgccggcaagtagcttattgactcgagcggcgcgcgcacgctcctgctccaactccttctcggccttcactcgggcaaaatagtgagcagtagcttctgcgcgaagcttccgaacttcaacctgaagttcgagtttttcagcgcgcaatcgttgaatgatctctgtgtgcgtagttggaagcgaaggcttttccttcgcttctcttattttctctctaactactggatatcgacagtttttatctagtccaattaatgttctagaccgccccgcctcgacggcaacgttactgatcgtgatcttcatcttcccggcagctagccgatctttcatcttcttagtttttggcttcccgatctgcagccgcgccagcgcatctagaaattcctgctcgatggagtctcccgaatatatcgcttttctttttaacgacatttgactcaccaaatcctttatgtgttttttgtcctatagctcactgacatttacaccgagttttcgcagtatcttcttcgcctgctctgcgcgctcaaggatcaccctgaaaccattcattttacccaccgcttccgcctcacgaattgcgatttggctttttgtaaagcgctccgaccaaaatgctatgtgactcttatcaataatcgcacatgcacatcccgcacatacgcttgaatctcgcgtggcaaaattcggatatcgccggaaccataatgaggtatttgaaatctcatgacacctcatttcgctcgtttttaccggacagcatgttgcatactccgtaaaaaagaattgaagctcttgattgtcagcccactcgtcgacgatccgccacctctcagaagttggtaattcgcctaaatcgtctttaaattcagcgatcgaatcacccaaagtttgggccattctacccgcggcaatactatctcctgttgccatctcataaatcagtaaatttcttctttgcctagaaaccgaatccagggcttcaacttggagtggattattccctatataaccgccctccgtcaccgccatattgaggtgatgaaactgcatttgtattgcaccaagaaggctcggatttgccgccagggtaaagctggcccaggtctttcgaagcatatgagagctaaagatctttccttttgactcgcgccaagggatcagctcgccgtcggatactttttgccgcgattcgttcggcagagccgtcaggtttacccagtcaacaataaaatccctcattgctttcctgagggagtccgacaaaatgggcttcagcgtccccgaaggatgagagagggaggcatggccgcgccactgaagtattagccgatcggtgaccgcgtgatcacgccaaagcgagaaaagacggttaagaacctgaagcgcacgtattgcaggcggtatttcattgcttccttccgggcgcatcccaagcacccagtcaacttcgatggggggcccctccttagtctttgagagcaacgatcggacaagaaaccactcgtatagaccacgtgagctggattccaaacggacattacttggtagcccagacacaggatcaatgcctccctttagcccacaaatttctgaaatgcgcatgcccgacattccttgaacaatgatggcgcacgcacccagcaaatcatatgcaagcattcgtgtagtcctatgtgctgcactctctccatacatgtcacttggcaactcggccagaggtcgatgccatggctcactcgaatcttttccactcccaaactcgaatcgtcgcaggtcgcgtcgcattctcttgattcgctgcgcgcgcccttcatttggatgttgcgcaaggatcgccacaagccgaagtatgtcttcagccggctgcgacagaaaccagagcgcttcattgaacatcggcacagcaacttcatctggtatgggctttatccaccctacgctttgtccggcgcattcgtcagcgatactagccaatgattttcgaaaaaatggatctattgaaatggattcaattcccatctgcgccataggaatacgttgacgccacaagttagcaagggcttcaagggcacgtcttgcaaccgacacagtgattttttcctcgtctgtacagtcaagcatgaattggggtaattcatctatatatctggagacgacgccagctgtcagctgagatggtacgtggtagccatttatggccatccacgacaataaccacttgaaagattgctggtgggcggaaacacctccaaccatcgtcggcactccttcggccggcattttaaggagagtcaaaaggagcgtcttcgaccaatgtaagcgtgcagcgtggtgtgggtcagtgagcttactcccgtcaaagagttctatactccaattgatggtgcttgcggtttttttaaggccaggcgtagtcggcgtaaactcccacctaacatccttaaattgactatgctcactgagccaataatcttctagctcctccttatttctctgaaacagcgcttttggctcgcgcgaactagatcgattaagtttggcggagttgcgctgcatacctatcagcccacctgcggcagcgaaatatgaaacctcaaagctttgctcatgatctgttcgggcaccatatttaggaggttgttcaaagccgacagccttggtgcccaacggcaggaccaactattcccgctcatctgcacttgactggcaaggagactgcttttcaatgcaaggtagtatgcaacactaatggcatcatttggtctcgcgaccgcaaggggacaggtcggacagcctccgtagtctttgcacagtacgccggagcgctgccccggggagggagaatcaaacggatcaaggcagcgaaagcctggcgtagccgccgcacggtcatcagtattggtaagtcgacggggatcaatttttccctgtgtattgatccatctctcccgtaataatattacctctccgactttttcccggttccgcttgcgggctccatcgctggtgtaatgtgtccaggttgtgctcatgcgggaatgattacccactgcccgcgccgcctccaggccaccatcgaactgttgcaccatatcaataatggtgggtcgaatctgccccaaggtaaaatttggcagcctattatcagcaataaactcctgcagcttcggccgccatcccgaggaacgtagggtgtcatcggtgaatgagatcacccgcttctgacctactttgggcacaaagacgaatactctatcgcgatcctttttttcacaaactggccgaatcctcgacgtaattcgctccaaaagatctaagagatagtcaaagcaaaacttcctcgaaatgctcgccgatggatcaagcaaccgcaccagatctttctttgcgcgggccttttctccgattacacgtattcctctcagcccaagtcgaaggaaatttctgtcaatcgcgctccacttgaggcgtagaaccgtattggggttaaagactgtggcgatggttagcaatatcaccagaggaacgagatcacggggactggaatacaagtaagacgctagagttcgggcaccgtgctccgtcgctgcgtacccgaggctcctattttccttcccaatatcctcaagcgtaggaagcacgtttggatacttcgccgccaacattgcaagacataccgaaacgttcttgaggtcagtgtgtccttcttcgattgctcgcttaccctccgagatgaggacgcccccataatccagcctcgaagcaatctcctccagttcttcttcacacgcatcgataatcgctactagcgagctggctgaaatgacttccaagggtgaggctcttcgagctgccccaaagggacctcgaggcacacgttgggcgatggactgggcgctttctgcccagggccccttgtctatcactgatagcaatatccgcggacatccgagatagtttttgatgctattaggatggagcggtttccccctaacacgtcttgcaaatagccactcacgatatccggtgaacaattcatcattaagatcaggcggagttagctctactcctgcgtagcaactgtccaaatacgaaaacaatccatttcgcaacgtataaactagccccacacgcgtgcgaatactacgggtgggagcccaaagcaaaatcgcttgtgcaaagagcggcatcaactctgactgcgtgagaaggaagctaagatcaagtgcctgcgtctccccgacatcggttcggatcagtgcacgaagcgtcggccgtccatcgtcacgacgccccgattcaagaagatttacaggaaacaatggatgggcacgatccttagaaccatcctcggcattaagctggcgaacgacgctcgccgccgaagacactcgcttcgcacggatggtcctattctcgctcataatccgattattttccgcacatcatacagaccaggctgcatattaaatacctccacatgagctaaatagatatcaatagtcgtctgtagatgcttgtgtccgagttgtgcttgtatttttttccaaggctctggatttccgctcatacgttcagcgtgatacgtaagcacggcgtatgtatgccggagatcatggattgagtgcctcgcccgcttcctaaaaaaattattggcgccctctggatcgatgcaatcgacaatcttcaaccgcccgataccgaggcatgcctcctcaaaaattccttgcatgcggctgattgaaattggcttactctggcgactgcttccgtattgactcagaaatagccggatcggttgatttcgaaaaggaatatcagtcacctggagtaccgcggcgcgctcaccttcaatgtaagcaagaatatcggacacgagccaattaggaatcgcgacagcgcatgtcttgcctccctttcggacgatactcagttgctgatcagcactcggagctaaaggatcaggtgccagcgcgagaaactgcaagatcgtcaatgctgcaatctctcctacgcggaggcccacagcccatcccagatcgaaaatgatcctatttcggcttagccgttgatcaccggccattttttgcgttgcacgaggcccagcatactgcaataatgcccgcaaatcctgtcgcgtcagaggatgaattgccaaattaggccgagcctttggaagatcaacgtctctgtaatgtcgaaaatcgctgccgcagagatttgacccaatgtctccgtcgtaccattcggcatcccgcgcataaatataaaaatctcggataaccgacattctgctttttaccgtggacgcatggtacttcccccccgtcttcggggaaatcgcaaccatgtaagcatctctgtaatcaattcgatcttgtgaggacgccagcctccagtctctcttcaggatctgcagatactgaaaccaggttttcaatgcctgtgccacggctgcccaagtatgcgggctagttctaattcctcgcgcaactatgcgctcgtgtaaatagagactgggctcttcaaaaacaagtgattgactactggtccgaatgaaaaaagatggctgcccaaccgtgagactgctcacacctggttcatggtgcgcgcaaagcacaatctcaccttccaagaaatcgagcattgaaacattggacatgttcgcgagtgctgagccctttcgcgaatgctagcacgtcccggtcaggtacaggaccagaacttttatctgaacaaattcagagtggacatctaccgccctacttaggcagccgctccccgcttcacagaagtacatctattttctttgccagaataatggcaattatcgattccacatcatgttcgcatagaataataaaattaaaatttcaatatgagcctccaagtgactccattcacagtcactagctagacataatccattgagatgcaggacaaaaaatgttcacgcgaaggtgatcacggctgtggctttcgtgaacaaatctcgacgatgccctgccagcagtccgctatgcgctgccctccagccattacctatgaacactttcctactgagattggagttacccctttagtcgatccccgctgggaaaccagcgtcatcgtgaggatctcagcggagacgtttcactccacatttcgtgctcgcaaccgcggtaggggttgagcgagacatcgaacgggatgtcgggcgatgcattgcgcgtcaggaccgaacgggcgcgctcgatatggacttccgtgcgcagcggcggcagcggcgctgcctccggcgacggtgcggcttcggtggtacgcggcgcctcttctggtgcactgctccagccatcgtcgaacgcttcacgcaggtcgcgctcgaaacgcccctgcaggttgctcacggcgcctcggcccttgcgcgccacgggcggccgcgggcctgcctgcggcgcgagtgcgtcggggtcggcatcgggccgcgtcgggcggctgctgacaggcttgggtttcggcggggggcgctccatgctggccttggtcacactgcctggctcttctcctcgacggaaatcgccagcgtctccttgatctcttccatcaccacatagctcttcgactgcgctgcgccgggcagctgcagcaggatgtcgcccagcagccggcggtattcaccgatctcgcggatgcgcgccttgatcaggtagtcgaaatcgcccgataccaggtgacattccagcacttccgggatacgcagcacctcgcgccggaactgctcgaacatattgcccgacttgttgcccagcgagatctcgacgaacaccagcagcgcgctgcccagcagcgccgggttcagccgtgcgtagtagcccatgatgacaccatcgcgctccaggcgcttgacgcgctcgatgcagggcgtgatggtcagcccgaccgcttcggccaggtccttcatcgacatccggccgtcgctctgcagcgccgtcaggatcttgcggtcgagccggtcgagggtgcgcatgggctggcgactcgttctcatgagtttttcctgttttcctgagaaattcgataacaatgactggattggtttcaatagtatagagataaatcctttatcaacttgtcaccgcagttggagcccccggacatgcgcgttctcgtactaggcagcggcgttattggcgtcaccagtgcgtggtatctggccaaggccggtcacgaagtgaccgtcgtcgaccgcgaggccgggcccgcgctcggcaccagctttgccaacgcggggcagatctcgcccggctatgcgtcgccgtgggcggcgccgggcgtaccgctgaaggcgatcaagtggatgttccagcaacatgccccgctcagcatccgtccggacggcacgctgttccagctgcaatggatgtggcagatgctgcagaactgcagcgccgaacgctacgccgtcaacaaggagcgcatggtacggctggccgaatacagccgcgactgcatccgcgcgctgcgcgcggagacgggcatcgcttatgaaggccgccagcaaggcacgctgcaggtgttccgcaccgacgagcagctgcaaggcgcggccaaggacatcgccgtgctggaagaagccggcgtgccttaccagttgctttcgcgcgaggaactcgccgcgagcgaaccggcgctggccgccgtccgccacaagctggccggcggcctgcgcctccccaacgatgaaaccggcgactgcgcgctgtttacgcaacggctcgcgggcatggccgagctgctgggcgtgaaattcctgtacaaccgctcgatcgacagactgatgacccagggcgatgccgtcaccggcgccgtggtcgacggccagccgatggatgccgacctggtggtggtggcgctgggcagctggtcgacgcagctggtcaagccgttcctgcgtggcatgtccaacctgcccgtgtatccgctcaagggcttctcgatcacggtgccgctgagcgatccgtcgcgcagcccggtgtccaccgtgctggacgaaacctacaaggttgccatcacccgcttcgacgaccgcatccgggtgggcggcatggcgcagatcgtcggctatgaccgcagcctggatccggccaagcgccgcacgctcgaacacgtggtcaccgacctgttcccgggcgccggcgatgtcagccaggccgccttctggaccggcctgcgcccgatgacgccggacggtacgccgatcgtcggcccgacccaggtgcgcggcctgtggctgaacacgggccacggcacgctcggctggaccatggcctgcggctcgggcaagctgctctcggacctggtctctggcacgtcgccggcgatccgcgccgacgacctgtcggtgggccgctacctgaagccggcgcgccatcacctggcgcccaggcctgccactgcctgaagcaggctgcctcgataagcaaaaagggcggccccgcggggccgccctttttctttccggcgactgtcaggccactcagaactgctcggccgtcatcgcattcaccggtgccgcaccactgacgatggcatcgcgcaaagccgacgcctgcgacaggatgtgctccgcaaagaaatgcgcggtggcgatcttggcgtcataaaagcccggatccccggcccgcttcgcatcggcggccagcatcgcacggccgaactgccagccggagaacacgatgccgcacagcttcaggtaaggcacgctgccggcaaagacggcgttcgggtcggacttggcattggccacgacaaacgccaccacgtcttccagcgccgcgcgacccttggccagttgcgcctgtaccgcggtgaacccggcgcagctgtgattgcccagcgcagcctcggtctcggcgatctgcgcgcagatcgcacgcgccacggcgccgccgtcgcgcacggtcttgcggccgatcaggtcgttggcctggattgccgtggtgccttcgtagatcggcaggatacgcgcgtcgcggtagtgctgcgccgcgccggtctcctcgataaagcccatgccgccgtgcacctgcacacccaggctggtgacgtcgatcgacagctcggtgctccagcctttcaccaccggcaccaggaactcgtagaaggcctggttctgctggcgcaccgcttcgtcgggatgctggtgcgccgcgtcgctggcggccgcggccacgtaggccacggcgcgcgcgccttcggtcagcgcgcgcatggtcatcagcatgcgcttgacgtcagggtggtggatgatggtcaccgcctcgcgcgccgaaccatcgaccgggcggctctgcacgcgctcgcgcgcaaaggccaccgcctgctggtaggcgcgttcggatacggcgatgccctgcatgccgaccgagaagcgtgccgagttcatcatgatgaacatgtactcgaggccacggttctcttcgccgaccagcgtgccgatggcgccgccatggtcgccgaactgcagcacggccgtggggctcgccttgatgcccagcttgtgctcgatcgagacgcaatgcacgtcgttgcgctcaccggtgctgccgtcggcgttgaccatgaacttcggcacgatgaacagcgagatgcccttgacgccctcgggcgcggtgggcgtgcgggccagcacgagatggacgatgttcttcgccatgtcgtgctcgccgtaggtgatgaagatcttggtgccgaacactttgtaggtgccgtcgccctgcggctcggcacgggtgcgcactgcggccagatccgagccggcctgcggctcggtcaggttcatggtgccggtccactcgcccgagatcagcttgggcaggaaggtggccttctgctcatccgtgccggccgtcagcagcgcttcgatggcaccatcggtcagcagcgggcacagcgcgaacgacaggttcgcggtgttcagcatctcgttgcaggcggtggcgaccagcttgggcaggccctggccgccaaactcctgcggatgcagcacgccctgccagccgccctcgccgaactggcggaaggcctccttaaagccgggcgtggtggtgaccacgccgtccttccagctgctcgggtccaggtcgccggcgcggttcagcggcgcgacgacctgctcgttgaacttggcggcctcgtccagcactgcctcggccgtttccggcgtggcttcctcgaagcccggcagtttgctcacggcctctagcccggccagctcgttcatgacgaacagcatgtccttgatcggcgcacggtaagtcatcgatgtctcccaacatgtatgaaaaagccgttcgcgggtcacccccggaacggctcgtacttgctaccagtgccggccgcctggcggccggcaaggcatcagcccagtgctgccaccagctccggcaccacggtgttcaggtcgcctaccaggccgtagtcggccacggagaagatcggggcttcggcatccttgttgatcgcaacgatcaccttggagtccttcatgccggccaggtgctggatcgcgccggagataccgacggcgatatacagctgcggcgcgacgatcttgccggtctggccgacctggtagtcgttcggcacgaagccggcgtccacggcggcgcgcgaggcacccagcgcggcgcccagcttgtcggccagcggcgtcagcaccttggtgtagttctcgcccgaacccacgccacggccacccgagacgatgatcttggcggcggtcagttccggacggtcgctcttggccacttcgcgcgaaacaaactgcgaaacgcctgcgtcggccacggccggcagggtctcgacggcagccgagccaccttcggcggcggcggcgtcaaaggcggtgccgcgcacggtgatgaccttgatcttgtcttccgacttgaccgtggcgatggcgttgccggcgtagatcgggcgctcgaacgtgtccggggcgtcgaccttggagatttccgagatctgggccacgtccagcttggcagccacgcgcggcaggatgttcttgccgtacggggtggccggagccaggatatgcgagtagtcgttggcgatggccagcgcctgctcggccacgttctcggccaggccgtcaccgaagtacggggcgtcggccagcaggaccttggtcacgccggcgatcttggcggccgcatcggccgcggccttggcgttggcaccagccaccagcacgtgcacgtcgccgccgcactgggcagcggcagtcacggtgttcagcgtggcggccttgatggattgattgtcgtgttcagcaatgacgagtgcagtcatgttatttctcccccgcgctcagataaccttggcttcgttcttcagcttctgcaccagcgtcgcaacgtccggcaccatcacacccgcgctgcgcttggcaggctcgaccaccttcagggtcgacaggcgcggcttgacgtcgacgccgaggtcttccggcttgacgatatcgagctgcttcttcttggccttcatgatgttcggcagcgtcacgtagcgcggctcgttcaggcgcaggtcggtcgtcaccacggccggcagcttgagcgacagcgtttccaggccgccatcgacttcacgcgtcaccgaggccttgccgtcggcaaccaccaccttggaggcgaacgtggcttgcggcaggccagccagcgcggccaccatctggccggtctggttggagtcgtcgtcgatggcctgcttgcccaggatcaccagttgcggctgttccttgtcgatcagcgccttcagcagcttggccacggccagcggttgcaggtcttcgttcgattccaccaggatgccgcggtcggcaccgatggccatcgcggtgcgcagggtttcctggcactgcgtgacaccgcacgagacggcgatcacttcggtgacaacaccggcttccttcaggcgcacggcctcttccacggcgatttcgtcgaaggggttcatgctcatcttcacgttggccagatcgacgccgctgccgtccgccttgacgcggaccttgacgttgtaatccaccacccgcttgactgcgacgagtactttcatgcgctcactccactgatagctgatagtcagaaattttgttcgctcgtcattataaccaccgggttggcggctctcctgtttttcgaacgatcgtactattttatcggcaaaatgatgccgggcatagcccggcagatcccagccgtccgacgattgtgccgcaaaccggggcttgcgggcatcgtctgattggatgaaaccctcaaagtggcgtcggcttaccaggcggtaatgaccgagtccttgaaggtcgatgtgacgtattgcttgatttccggcgagtgataagccttcaccagcttggccacccagggcttgctcttgtcagcctcgcggatcgcgatcaggttggcgtacggacccttcgggccttcgatggcgatggcatccttgacgggcgacaggccggccgattccgcgtagttgccgttgatggcggcggcatccaggtcatccagcgagcgcggcagctgcgcggcgtccagctcgacgatgcggatcttcttcgggttctcgacgatgtccagcggcgtggccttcaggccggcgttaggcttgagcttgatcacgcccttgctctgcagcagcaacaggccgcgcccgccgttggtgggatcgttgggcacgcccacgcgcgcaccctgcttgagctggtcgagcgacttgatcttcttcgagtacacgcccatcgggaacgtcaccgtataggcgatatgcgtgaacttgtagccgcggtccttgatctgggcttccaggtacggcaggtgctggtagctgttggcgtccaggtcgccggcggccagcgcggcgttgggctggatgtagtcgctgaactcgaccacgtggatgttcaggccgtccttggcggcgaccttcttcacctgttccatgatctgggcgtgcgggccgccggtcacgccgatcttgatcggcttttcctgggcgacggcgcccgttgccagcgttgcgccgatcgcggcgccgagaatccattgcagcaggttgcgacgttgcatgatatgcgttcctgtttcagaaaataattgacttggcgttgacggattagcggtggctgatacggcggacaagccagtcgccgaagctctgcacggcctgcacgaacacgatcaggatcaccaccaccgccaccatgacctcggtgatatagcgctggtagccgtagcggatgcccaggtcgcccagaccgcctccgccgatcgcgccggccatggccgaatagccgaccaggctgacaaaggtgatggtcaggccggcgacgatgccgggcatggcctcgggcagcagcaccttccacacgatctggcgggtggtggcgcccatcgactgagcggcctcgaccaggcccttgtcgacctcgcgcagcgcgctttccaccaggcgcgcgataaacgggatcgccgcgatggtcagcggcacgatcgccgcggtggtgccgatcgacgacccgacgataaagcgcgtgaacgggatcaccaccaccagcaggatgatgaacgggatcgagcgcacggcgttgaccaccacgccgatgccgcggttgaacagcgggtgcgacagcacgccgccacggttggtcaggtgcaacagcacgcccagcggcacgcccagcagcgagccgaccacgcccgagatcgccaccatcagcagggtctcgttgaacgaggtcaggaacaggtcaaacatttcagaccacatgctcgaactcctccaccacgacgccttgcgcctgcaggtattccatcgccgccttcacgtcggccagttcgcccgtggccatgatcgccagcgagccgaaagcctggccctggatctcgtcgatatggccgtgcaggatattgaagtccagcccgtagcggcggatcgcctgggccagcaccggctggtccacgccctcgccggtgaaggccaggcggtagacatggtcgcgcccgttgccgagccggctctccacgcgcttgagcacgctggccggcagttcctgcgagatgacgtcgccgatcatggcgcgggtgacgtcgtgctgcgggcgcaggaatacgtcgatcacgcgcccggtctccaccacccggccggcttcaagcacggccacgcggtcgcagacctgcttgatgacttccatctggtgcgtgatcatcacgatggtcaggcccaggtcgcggttgatctgcttgagcagttccaggatggagcgggtggtttccgggtccagcgcggaagtggcctcgtccgagagcagcaccttgggcttgctggccagggcgcgcgcaatgcccacgcgctgcttctgcccgccgctgatctgcgccggatagcggcccttcagcgccgacaggcccaccaggtccagcagcggcagcaccgtcgcggcaatctcagccttgggcttgccggccagttccagcggcagcgccacgttctcatacaccgtgcgcgacgacagcaggttgaagtgctggaagatcatgccgatctcgcggcgtgccaggcgcagcgcgcccgtgtccagcgcggtcagctcctggcccgcgacgatcacgcggccgctcgagggccggttcaacaggttgatggcgcgtaccagcgtgctcttgccggcgccgctgcggccgataatgccgaagacctcgcccgccgctatcgacaggctgacgtcccgcaatgcatgcacgtcgccagacgcgcccgggaagcgctgcgacagtccttgcagttcgatcatggaaaggtgaccaaaagaaaaacggcaacaggcgagggatctccagcgctgttgccgctcgttatttttctgaagcgcgtattttatgcgattcgcttcataccataaacgactttttaccgatgtctttatacgttcccggcatataaggggcaaaaaagtcgattatgagccacgccaggacggcgaacgcttgtcaatgaaggcctgcaccccctccagcgccgactcgtccatcatgttgcaggccatggtctggccggccagctggtaggcggcctcgatgcccatttccagctggcggtagaacagacacttgccggcggccaccgcggcggccggcttggcgcagatgctggcggccaggcgcgccacctcttcgtcgagctggccagcgggcaccacccggttcaccagcccgcgctcacgggcggtttcggcgtcgatcatgtcgccggtcagcagcatctccatcgcctgcttgcggtgcaggttgcgcgacaacgccaccccgggcgtcgagcagaacaggcccaggttgacgccggacaccgcaaagcgcgcatcgtcggcggccaccgcaaggtcgcacatggccaccagctggcagcccgccgccgtggcgatgccctgcacgcgcgcaagcaccggctgcggcatcttctggatcgccatcatcatgcgcgtgcagcggtcgaacaggcgccggtagtagtcgtgcgacggcgaggcccgcatctcgcgcaggtcgtgcccggcgcagaaggccttgccggcgccggccagcaccaccacgcgcacggtatggtccgacgccagccggccgagggcttcggtcagcgcgtcgagcagcccttctgacagtgcattgaacgcctgcggccgattcatggtcagccgcaccacgcccgcggtgtcgcgcgattcggtcagcagcggcgcgtccacgcgcgcatcggtctcggccatggccatgctctcctatcgttccagcagcaccttcaggtgcgccagcacgctgcggcccagcgcgctcaggttgtagcccccctccaggcagctgacgatgcggccctgcgcatgggcgcgcgcaacgtccaccagctggccggtgatccaggcgtagtcctgctccaccaggcccatctggcccaggtcgtcctcgcggtgcgcgtcaaagccggcggagataaacagcatctgcgggcggaactcattgagccgcggcagccagatggtctcgaccacttcgcgcacggccatgccgttggtataggccggcagcggtatgttgaccatattgggcgcgagatgctcggtgccgctgtacggatagaacgggtgctggaaaatgctgcacatcatcacctgctcgtcgccgcggaatgccgcttcggtgccattgccgtggtgcacgtcgaaatcgatgatggccacgcgctccagcccgtgcgcccgcagcgcgtggcgcgcggcgatggcgacgttgttgtagaagcagaagcccatggcgcggtcgggctcggcgtggtggccgggcgggcgcacgcagcagaacgcgttttcgaactcgccggcgatcaccgcatcggtggccgccaccgccgcgcccgcggccagcgtggcggcggcaagcgtgtgcgagttcatcgaggtatccggatcgatcgcgtgatagccgctggccgggctggcgcgttcgagtgaatcgacatagtcgggccggtgcacgcgctcaagctgctcgcgcgtggcgggcggggcttcgcggcgctccagcagcccgtccaggccgtgcgaaatcaggtgatcctcgatcgcctgaaggcgttccgggcactccggatggaaatgccccatctcgtgccgctggaactcggggtgcgtgtaatagcctgtcggcatctcttatcgtcgcgatgttgtctccaatcgctacgttagcacacgccagcccaagccacccagcggcgccggcgcgccatctcgtgacgacttgccggcagttgccgcagtggcatccgctatactcggtgcgacttgcaaaggacatcatgaccgacacccagcgctcactgcgacgccccctgctgggcgccgcgctttccgctgccgcactcggactctgcggcctctcccccagcctgctcgccgcgggcaagcgccgcgtcagcatgcgcgaggaagagatcgaacccggccgctaccgcgacaatccgcagacccgcgcatttatcgacgagatggtggcccgccaccgccttgaccgtggcatgctgcaggagtggtttggccaggcggtctattccgccaccgtggtgcgtctgatcatgccgcccgccaccaccggccgcaaaagctggcgcacctaccgctcgcgctttatcgagccgatccgcatcaacgcgggcgtgcgcttctggcaggacaaccgcgacacgctgcgccgcgccgaagccgagttcggcgtgccggcatcggtcatcgtcggcatcatcggcgtggaaaccatctatggccgcgacatgggcaccttccgcgtgctcgattcgctgtccacgctcgccttcgactacccggacacgcccaaccgcgaagcccgcaccacgctgttccgcaaccagctggccgactacctgctgtggtgccgcgacacccgcaccgacgtgtactcggtgctgggctccttcgcgggcgcgatcggcatcccgcagttcatgccgaccagcctgcgcgaatacgccatcgactacgacaacaacggccgcatcgacctgcgcaacagccctaccgacgccatcggcagtgtcgcgcgcttcctgcagctgcacggctgggagccgggccgcccggtggtgtggcgcattgccggcgacgccggcagcctgggtatcgccaccgccgcggccgacggtgagccgtggcccacgcgcacgctcaaccagctgacccgcgccggcctgcgcgtggacgagccgatcgaccccgcgcgcgaaggcgagactggcgtgctggtggtggacttgcccacccccgaccagccgaccgagtacctgctcggcctgcgcaacttctacgtgctgacgcgctacaaccgcagcttcttctatgcgctggcggtgtaccagctgggcgaggcggtcaaggcggcgatgggctgacgccagctgcccgccaaagcaagaaaggcctcgcatttgcgaggcctttcttgttggcaccggttcaggtcacgccgggaacacgccggtcgacaggtagcggtcgccgcggtcgcacacaacgaacacgatggtggcgttctccacttcctcggcaatgcgcagcgccacgcagagcgcgcccgcggccgaaatgccgcagaagatgccctcttcggacgccatgcgccgcgccatgtgctcggcatcgccctggctcaccggctcggtgcggtcgatgtagctggcatcgtagatcttgggcagatacgcctcgggccacttgcggatgcccgggatgcgcgagccttcggccggctgcgcgccgatgacctggatctccgggttctgttccttcaggtagcgcgacacgccggtaatggtgccggtggtgcccatcgccgaaacgaagtgggtgatgcggccgtcggtatcgcgccagatctccggcccggtgccctcgtagtgcgcctgcgggttgtccgggttggcgaactggtcgaggatcacgcccttgccatcgcgctccatcgaatccgccaggtcgcgggcgtactccatgccgcccttgaccggggtcaggatgatctcggcaccgtaggccgccatgctctggcggcgttcgaggctcaggtcctcgggcatgatcagcaccatcttgtagccgcggatggcggccgccatggccagcgcgatgccggtattgccggaagtcgcctcgatcagggtgtcgcccggcttgatgcgcccgcgcgcctcggcccgggcgatcatcgacaccgcggggcggtccttgaccgaaccggccgggttgttgccttcgagcttgccgaggatcacattgccgcgcgcgtcgttggcggcaccggggatgcgctgcagtctgaccagcggcgtattgccgatggtgtcttcaattgtcttgtaggccatggagcgaggggtcgcgaaagggggtcgcaaacgggggattccaattcgccggccattgtaatccagacacctatccctcgccggcaggcgggatttacgctgccacccgcccgcctgcgcccatcctgccctggctcagccctcttcgtggttgccttcgcccaacaggtggtacagcaggatgcagccgaaggtggcagtcccgatgccgcccagcgtcatgccgcccagtttcagcgtcaggtcgccggcggccaccgtcagcgtggcgccaaccgtgatcaggttgcgcgagctggagaagtccaccttgttctgcacccagatccggcccgccgtcgccgcgatcaggccgaacacgacgatggtcagcccgccgatcaccggacccgggatggtcaggatcagcgcaccgaacttgggcgagaagcccagcaggatggccaccgcggccgcgaccacgaagatcagcgtcgagtagatcttggtgaccgccatcacgcccatgttctcggcataagtggtcacgccggtgccgccgccgctggccgacagcatggtcgcgatgccgtcgccgatgaaggcacggccgatatacgggtccaggttgcgcccggtcatcacgccgatggccttgatatgacccaggttctccgccaccagcacaatcgccaccggggcgatcagcagcatggcgctgagctcgaaggtcggcgccgtgaacgccggcagcccgaaccagctggccgctgccacgctggagaagtcgatcggcttgcccagccccatcacattggtgcccaggtagtaggcgaggtagccggccaggccgccgatcagcaccggcaggcgcccgatcatgccgggcgcacgcaccgccaccagccccacggccaccaccgtcagcaggcccacccaggtatcgagggccgccccgctgaccgccttgaccgctaccggggccaggttcagcccgatcgccgcgacgatggcgccggtcaccaccggcggcatcagcttttcgacccaggcgtagcccaccgcctgcacgatcaggccgatcaccgtgtacagcgcgccggcggcgatgatgccgcccagtgccaccgggatattgaggttggggccgctgcccgcgtagccggtggcggcgatcaccacggcgatgaaagcgaagctggagccaagatagctcggcacccgcccgcgcacgcacaggaagaagatcagcgtgccgatgccggaaaacaggatggcgatattcgggttgaaacccatcaggatcggtgcaatggcggtcgagccgaacatcgccaccacgtgctggatgccggccagcagcgtctgcccggcgggcagccgctcatccggcccgatcacaccttcggtcttgagccgccactgcggcaggaatcccgcgtcctcgccattcgccatattgttctgctccctgtggtccgggctggccgcctggtcggcggccgccgcgtttgtgcctggttgtttggtagatgcgtgcctgtcggcagtcacgcgcggcagatcctgccggcgcggcgtccgcatgatactccgccgccacggggcgtgcgaagcggcaagggtctagcacaacccataccagcaaggagagcgcccggccacgtggcagccgggcgccagcccctgcgcctgctagcgcgccggcttggtggccgccgcgggcgctgccttggcggccttggccggggccgctgctgcggctcccttcgggccaatggcgaggccagcgtcctgcagcttcgccacggacttcggcccgatgccgctgacgcgctcggccaggtccgcggcgtccttgtagggcccacgcttgttgcgttcgtcgatgatgttgcgggcggtggcggctcccacgcccttgaccgaggtcagcgccgcctcgtccgccgtgttgacatcgatggcggcatgcgcggcaccgcctgcgaacaggcagatggttgcagcaaggaataccagggaaaaacgccgggcaagttgccggacccaatgcttgaacatgaaggctctcctttcctgtggatggtctgaggtaccacccccgccggggcggcgaggtcaggtcaggataggggcgggccgcagcggcggcccatgcggcaacaaaagttgacaccggccgcacgaaagcgtgtcggccggctgcgcgccgattgtcagccggcgcgttcgatcagccagcggcagtagcgcgccacgccttcctcgacgctcaggaacggctcgctgtagccggcgctgcgcagcttcgacacatccgactgcgtaaagcactggtacttgccgcgcagcgcatcggggaacttgacgtactcgagcaggccttcctgcaccagttcatcgagcgacaggcgcggcttgccttcggcctcgcgcagggtattgaccacggtggcggcgatgtcgttgaacggctgcgcgcggccggtgccgagattgaagatgccggacttgtccggatggtcgaagaagtgcaggttgaccttgaccacgtcctcgaccgagataaagtcgcggctctgcatgccgggggcatagccaccgtactcgccgaacagcttcaccgtgccgtcggcgcggaactggttgaagttgtggaaggcgaccgaggccatgcggcccttgtgcgtttcacgcgggccgtacacgttgaagtagcggaagcccacgatctgcgacagcgccgacggcagccggcgccgcacgatctggtcgaacaggaacttggagtagccgtacacgttcagcgggcgctcaaactcgcggtcttcgcggaacacctgcgaagcaccgtaggtagccgccgacgacgcatacaggaactgcgtgccctgttccaggcagctctccatcagcgacagcgtgtaacggtagttgttctccatcatgtaacggccgtcggtctccatggtgtcggagcacgcgccctcatggaataccgcccgcaccttgccgaactcgccgcgggcaaagcgcgcgaggaagtcctgcttgtccaggtagtcggagatctcgcagtcgaccaggttgtggaacttgtcggcacgggtcaggttgtcgacagcgatgacgttggtctcgccgcggtcgttcaggcctttgacgaggttgctgccgataaagccagcggcgccggtgacgatgatggtcatggtcggatcaggatgggggcgccacgcctcacggggcggcgccgaacaattcagaataagagacgacggcggtaccaagcttgcccaccacgatggcgccggcacgattggcatgctgcacggcttccttgagcggcacgccggcacccagcatggtggcgagcgtggcgatcacggtatcgcccgcacccgatacatcatagacctcgcgcgcctgggcggagacgtgcagcacctcggcctcggtgtagagcgtcatgccctcttccgagcgcgtcagcaacagcgcctccagctgcagcccgcggcgcaggttctgcgcgcggatggtcaggtcggcctcggtcttccaggcgccgaccacggcacgcatctcggcccggttgggggtgatcagggtggcgccgcggtagcgcgagtagtcgtcgcccttgggatcgatcagcaccttgcgcccggccgcgcggctggcgtcgatcatgcgcgtgacgtgggtcagaccgcctttgccgtaatcggacagcaccagcacctggtagtcgttgatcagggccaggaagcggtcctgtaccgcggccagcacttcatgcgccggcgcgctctcgaaatccacgcgcagcaactgctgctggtgcgccaccacgcgcagcttgatggtggtgttgagcttgggatcgcggtgcaggtagggctgcacatggctctcgcccagcagcgcttcaagcgtgcgggccggctcgtcgtcgccgaccacgcccagcatgcccacgcgtgcgcccagtgccgcggcattgcgggccacgttggcggcgccgcccaggcgctcgtcgctgcgcttgacctggaccaccggcaccggtgcttccggcgagatgcgctccacatcgccgaaccagtagcggtccagcatcatgtcgccgaccaccaggatatgggactgccggatctgctcctgcggaatgacggtcttgttcatgaagatccttggcaatatcgcgccggccgcggccgccgcgttagcttatcggttgatgagtccgttgacccgccggcgcctcattcgttcacggcctgccgggtcgggcggccgatggcgtggtactccacgccggtctcgaccatggcctcaggctcatacaggttgcgcccgtcgaagaccaccggggccttcaggcgccgcttgatctgaccgaagtctgggctgcggaacaccttccattcagtcacgatcaccagcgcgtcggcgccgtccagcgcatccatctggttctcgtggaaactcacgcgcgcggcgccgcccggcaggtcggccaggtcggcatccagcacgcgccgggcttcggccatcgacaccgggtcgtgcatgcgcagcgacgcgccgcgcgacaccagttcgcgtgccagcacccgcgacggtgcctcgcgcatgtcgtcggtgttgggcttgaaggccaggccccacaccgcaaaggtgcggccagtcaggtcatcgccgaagcggcgcacgaccttgtcgcccagcacgcgcttctgtgcgccgttgaccgattccaccgcttccagcacgcgcatcggcttgccatggtcggcggcggtgcgcatcagcgcctgcacgtccttggggaagcatgaaccgccatagccggcgccggcatacaggaagctgtagccgatgcgcgggtccgatccgatgcccatgcgcaccagttcgatatcggcgccgacctcgtcggccaggttggccagctcgttcatgaacgagatgcgcgtggccagcatcgaattggcggcgtatttggtgaactcggccgagcgcacgtccatgtagaaggtgcgctcgtggtgccggttgaacggcgcgtaaagctggcgcatggtggcctgcgcgtggcggccggcgacgtcggcgttgcagcccagcacgatgcggtccgggcgcatgaagtcctcgaccgcggcgccctccttcaggaactcggggttcgacaccaccgagaactgcaggtcttccaggctgcgcgcggccagctccgcgcggatcgtggcggccacgcggtcgccggtgccaaccggcacggtggacttgtcgaccacgaccttgaagccggtcatatggcggccgatattgcgcgccgccgccaacacgtacttcaggtcggcagagccgtcttcgtccgggggcgtgcccacggcgatgaactgcacgtcggcgtgctcgacgctggccgccacgtcggtggaaaaggtcagccgcccggcggcccggttgcgctggatcagctcctgcaggcccggctcgtagatcggcaccccgcctgcgttaagcagcgcgatcttctgctcgtccaggtccaggcagaacacgtcgttgccaagttccgccaggcaggcgccggtgacaaggccgacatagccgctgccgatgatcgtgactttcatagcgtcaattcaattctgttgcacaggccgcccgggatcagccgagcgtctcggaacgccgcggggcgtaggtttcccagcggttgcatcccgggcattgccaatagaaaagccgggcgcggaagccgcactcgcggcaggtgtagcgcgcgaggttgcgcgtgcgcagctgcagcaggtcacggatggccgtggtttcctgcgcttgctcgccgttgccgtcggcgccctcggcaccctctgccggggcatcggcacccgccggctgcgcggacggggcgccggccgtgaccaccgccgcctgcgcctcgaaatacttggtcagcgccagcagcgtgggctggcggcgcagctgttcgcgcatcaggcgcgcggcggcttccgggccattcacttccagctctgccttgtaggcggtatcgagcacctccggcgccagcttgcccttgagcaggccgcgcagccattccagtgcggcgccctcctcctgcaggctggcgtaggccttgaccacgcggtccgccaccagcggcagaaaggatgcatcctgccgttcgatgccaagccagtggccaagcgccgcgcgggcatcgcccgccgccgcggccacgtcgcccaacaggatcggggcacgcacgttggcaggattctcggcaacggcctggttcagccacttcaccgcatcttcggggcgcttgcgctgcagcgcgtcctgcgccagctcgcagcagaactgggcaatctgcaggctgtagctggtctgctccagcgtctgcagctcgcgcgcagcctcgatcgccttctgccactccttttccacttcatagagctcaagcagcacgcgcttggccgacgccgcgtaggggcccgacatcagccggcgcagcgattcctcggcgcggtccagcaggccggcgcgcaggaagtcctcgcccagttcaaacaaggcatgctcacgctcgggctcgggcaggtcggggcgggtcgccaggttctggtgcacgcggatggcacgctcggtttcgccgcggcggcggaacagcgcgcccagcgcgaagtgcagctcggtggtttccgggtccagccgcgcgacctcgataaaggcgtcgatggccttgtcgggttgctcgttgagcaggaagttgaggcccttgaaatacgagcgcggcaaggcgccctgctcgctgatcagctggcgcacatcgaagcgcgccgccatccagccaaggccaaagacaagtggcagcgccagcagccaccaggtttcaaacatcatggatcagaccttcgggccgactacgttatagggaacaggtttgccgtcgcgcggcgcggcggcggctgccgacgttggcgacggcggcgatgccgctgacgcgctcgcctgcgcgccggcatcggccagggcgcggcgcagccgggcaagctccatgcgctggcgcatcaggttgggcgcgatcgatgccagtgccgcgaccgcgccgagcacgaaggccgcgaacaggatcaggatcagcggggcatgccagacggcgttgaagaacagctgcagcgaggcttcggcggtattgcgcagcgccagcacgaacagcagcacgaatacgacgatgcggacgatccaggcgaacagtttcatgcggttggcagcgtttcagcgtgacgtggaagcggcaccggcgcactcgcgcgaggtccggcaaagaccccggcattgtaacggatacgcttcacctattcggtaaccgggccgtaatgcggcccgggctgcggcccggcgccagacgccggcaagccgcttgcgcacgatgcgccacccgtctcggtgcgcacgcaaggccggcagcaataaaaaaagcgcccctaagggggcgcttttttcaaccacacaagcagcaggcaaaacccggcaatcaggaagagcggacaaaattcagcccaccctcgtgcaatcccgccgctgcggcgggagcgctgccctggcctaccttgcccggcacggcctgggccgtgccggcggcatgaccgttgccattggcgcccggaggcgccggctggctgcggtcaacccgttcgcgcaattccttgcccgccttgaagtgcggcacccgtttttcgggcaccagcacacgctcgccggacttgggattgcgccccacgcgaggcggacgcttgttcagaccaaaactgccgaatccgcgaatctcgatgcggtggccatcggccaacgcctccgacatcgcgtcgagtatcgttttgaccgagatgtccgcgtcccgcagcagcagctgggggaagcgggcagccagtttttcgacgagctccgacttggtcatgggcatacgcgcaagcgcgggggcctgcgattactggttgtcctggccgagcttggccttcagcagggcgccgaggttggtcgtgccagccgtgccagtgtcagcctggaacttctgcatcgcttcttgctgctctgcgctgtccttggccttgatcgacaggttgatgttgcgcgacttgcggtcgacgttcaccaccagggcggtgatctgctcgccttccttcagcacgttgcgggcgtcttccacgcggtcagcggagatttccgaagcacgcaggtagccttccacatcgtcagccagctggaccacggcgcccttggcgtcaaccgccttgatggtgccctgaaccagcgaacccttgtcgttggccgagatgaagttgttgaacggatcgcccgacagctgcttgatgcccagcgagatgcgttccttgtcgacgtcgatgcccagaaccacggcttcgacttcgtcgcccttcttgtacttgcgaacggcttcttcgccagtctcttgccacgacaggtccgacaggtgcaccaggccgtcgatgccgcccggcaggccgatgaacacgccgaagtcggtgatcgacttgatctggccggccagcttgtcgcccttcttgtggttacgcgagaaatcgtcccacggattggccttgcactgcttcatgcccaggctgatacgacgcttgtcttcgtcgatatccagcaccatgacttcgacttcgtcgcccagctggacaaccttggacggggcaacgttcttgttggtccagtccatttccgacacgtgcaccaggccttcgatgccggcttcgatctcgacgaacgcgccgtagtcggtcaggttggtcaccttgccgaacaggcgggtgccttgcgggtagcgacgcgagatgccgacccacggatcttcgcccagctgcttcacgcccagcgagacgcggttcttttcctggtcgaacttgaggatcttggcggtgatttcctggccaaccgacagcacttcgctcgggtggcggacacggcgccaggccaggtcggtgatgtgcagcaggccgtcaatgccacccagatccacgaacgcgccgtagtcggtgatattcttgacgataccgttgacgatggcgccttccttcagggtttccatcagcttctggcgctcttcgcccagggtcgcttcgaccacggcgcggcgcgacagcaccacgttgttgcgcttgcgatccagcttgatgaccttgaattccagggtcttgccttcgtacggggtggtgtccttgatcgggcgcacgtcaaccagcgaacccggcaggaacgcgcggatgccgttgaccatcaccgtcaggccgcccttgaccttgccggtcacggtacccgagatgatctcgccgtcttccagcgccttctcgaggttcagccacgatgccaggcgcttggccttgtcgcgggagaggatggtgtcgccatagccgttctcgagcgcatcgatggccacggagacgtagtcgccggcctgcacttcgagttcgccctggtcgttcaggaactcctccaccggcacgaatgcctcggacttgaggccggcattgacgaccacgaaattgtggtcgatgcgcacgacttcagcggagatcacttcgccagccttcatattggagcgggcgacggattcctcgaacagtgcggcaaaggattcgttagtttgcaggtcggacataaacgtaaggtgaaatccgcaatacgctggccggcgcgactatcgcgctcagtctgccagtgcagcggggtcaggtttgacacaagccagccacaagtcttgcccgggctggcgccatctggtgccgtcggggtacgccgcttctactgatgcgcccgcatgcatctcatgcatcgggccgcacagcggcaaaccactccagcacctgcgccactgcctggtccaccgtcatatcggaggtatccagcagctttgcatcctcggcgggacgaagcggcgcggcggtgcgggtgcgatcccgtacatcgcgcgcttcaaggtcacgcaaaaggtcttcaatattagcagaaattcccttatcaatcaattgtttatagcgcctgcgagcgcgcgcctcaacacttgcggtcaggaacaccttgagcggcgcatccgggaagatcacggtgcccatgtcgcggccgtcggcaaccagcccgggcagcttgcggaagctgcgctgcagctgggtcagcgcatcgcgcaccggctggtgcacggcgatggccgaggcccggttgccgatcgcctcggcacggattgccaggctgacttcctcgccttgcagccagacgcggtcagggccgaacttcacatcgaggcgggaagcgatctttgcaagcgcgtccacgtccgccaggtcaatcccggcgcggtcgctggccagcgccacgagccggtacagggcgccgctgtcgagcaggtgaaagcccacggcgtccgcaaccttgtgcgcgacagtgcccttgcccgaggcagtcggcccgtcaatggcgatgacgttgacgatagtcattgtttataaagccaaaagaaacgattgattgtgaattcaattgagaatcattattatttgattcatggcgcttgaccgcagtcgcggcacggtgcccttcccgtcccagtcgcgaggcaatctaacatggcaaaaaccctgacgttcggcatcatgcacctcggcatcgcgttcagcgtgacgtatgcgctgaccggcagcctcgccatcagcggtgccatcaccttcatcgagccggccgtcaataccgtggcccactacttcttcgaccgctactgggagaagcgcgagcgccgccaagccgggactgcccgcaatcatgccgcggcgcagcgcaaccacgccaacctggccggcgcctagccggtcacgcccgcaaacacgctgaagtaatccgggaacgtcttcgccacacagcccggatcattgatccgcaccggcagcggcccgaaggctgccagcgagaagcacatcgccatgcgatggtcatcataggtgccaatgccgtcggccggagtctgccacggctgcggcggcgtcacacgcaggtagtctgccccctcttccacgactgcgccgagcttgcgcagttccgtcgccatcgccgcgatacggtccgtttccttgacgcgccagctggcgatattggtcagcgtggtcgtgccttcggcaaacagtgctgccaccgccagcgtcatcgccgcatcggggatatggttgcagtccagttcgatgccgtgcaggcgcccgtcgtcgcgttccgtgccgcgcacttcgatccagttgtcaccggccatcacattggcgcccatgcggttgagcgcctcggcgaagcgcacatcgccctggatgctggccatgcccacgccttccacccggaccgggccaccgccgatcgcgccggccgccaggaagtaggaagcggacgacgcatcgccctcgacaaagatctcgcccggcgagcggtaagccgcgccggccggcagcacgaagcgctcccagccctgccgctcgatctcgatgccgaagcgcgccagcaggttcagcgtgatctcgatatacggcttggagatcagctcgcccaccacctcgatctcgatgcggccgctgtcggattgcgccatcggcaggctcatcagcagcgcggtcaggaactggctcgacacatcgccgcgcacgcggatcggcgcatcgatgcgaatgccggccggctggatatgcaacggcggaaagccttcattgccaaggtagtcgatcacggcgcccacctggcgcaggccgtcgaccaggtcgccgattggccgctcatgcatgcgcggcacgcccgacagcttgtagttgccgccctgcagcgcaagcgcggcagtcagcgggcggatcgcggtgccggcattgcccatgaagagctcggccgacttgttcgggaaattgccgccggcgccggtgacaatgtagtcgtcgccttcctgccgccacgccacgccgagcgtgcgcaacgcctgcagcatcacgcgggtgtcgtcggaatcgagcagatcgcgcacgcgggtctcgcccgtggccagtgcggccagcagcagcacgcggttggagatgctcttcgagcccggcagccggacggtgccgttggcgcgggtcagggggcctagcgtcaggtgttccatggttctcgtgggcgccggggcgccgcggtcaggcgattggttcagggttcggtatggttgcccgcggcacgctctgcgccccaggccagccgggtcttgctggcgcgcgcgaagatgcgttcgagcgcgtcgccgtcgcccttctcgatctgcgccttcaggtgcgccagcaccgactggtaggtattcagctcacgcagcagcgcgtcgcggttggccacgcagatatcgcgccacatttccggcgacgaggccgcgatgcgcgtgaaatcgcggaaaccgccgccggcgaagcccagcttcagcgcggcatcttccgcattggcgacctgcgccaccagcgcgtacgacagcacgtgcggcaggtggctgaccgcggcaaacaccgcgtcgtgctgcactgccgacatcacatggcattctgcgccggcgctttcccacatggcgcgcaccgcggcgacatcggcgcgcgagttttcctgcagcgggcacagcacggtcttcttgccgaggtacaggtccggcagcgccgcctccacgccgttgagctcgcgcccggcgatcgggtgtgccggcacgaactgcgcgaccttgtcgccgagcgccgtcttggccgccatgatcacgtctgacttggtgctgccggcatcggtgacgatggtgcccggctgcaggtgcggctccagcgcgtgcagcagcgcaaagttctgcgccaccggcgcgcacagcacgatcacgctggcgccgcgcgcggcatccgccagcgtcgcggcctcgtcgatcacgccaaggtccagcgccttctgcagcgacgccggcgagcgccccaccccgaccaccgtgcccaccacgccggcgcgcctgagcgccagcgcgagcgagccgccgatcaggccgacaccgacaatgacaacacgggaaaaatgcaatgcactcacaatctcaggccgctaggggcagtggctcggaccaggccgaggtaaatcgatgattggcaacgaggcaggcaagcagcctgcagcgaaacgccgcaattgtagccgcgctcacgccaacgcccgctccagcgccgcgatgaaggccgcgttctcctcggccaggccgatggtcacgcgcagccagcgcggcaggttgtagttgcccaccggccgcacgatcacgccctgcttcagcaacgccaggttgacgcgcgcgccggcgccgtcgtcatcgcccacgcgcaccatcacgaagttgccggaagacggcacgtattccagcccgagccggtcgaaggcatcggtcagctggcgcttgccggcacggttcagctcggcgctgcggcgcaggaacccggcatcgcccagcgcggcgatggccgcggcctgcgccacgctgttgacgttgaacggctggcggatgcggttcagcaggtccgacagctccggctgcgccaccgcgtagccgatgcgcaggcccgccaggccataggccttggagaacgtgcgcgacaccatcaggttcgggtagcggcgcacccaggcgagcgaatcgtattgctggtcggcatccaggtattcgttgtacgcctcgtccagcaccaccaccacattggccggcacccgctgcaggaaggcttcgatctgcgcggccggcacgaacgtgccggtcgggttgttcgggttggcgataaagaccaggcgcgtatcgggcgcgatcgccgcggccatcgcctccaggtcatggccgtagtcgcgcgcgggcacttcgatggcgcgtgcgccgatctcctgcgtggccagcgcgtagaccgcgaacgagtactcggcatagacgatcgactgacccggctccaccagcgcatgcgcggccagctccaggatgtcgttgctgccattgcccagcgtcagccagtcggcgggcacgccgaagcgcgccgacagctcgcccttcagcgcaaagccgttggaatccgggtagcggccgagttcagccaccgcatcggccaccgcgcggcgggccgactcgggcatgccgagcggattctcattggaggcgagcttgacgatgccggcctcgtccaggccgaactcgcgcgcgacttccgaaatcggcttgccggccacgtacggcgaaatcgcccgcacatagccgggtccgaacaccgtgccgccttgcttaccctgctccgccatctcgtctccttgttcttgcctggctgccttacttgctcgacggatacgagcccagcaccttcaggtaagccgcgttgcgccgcagctcttcgatggcgcgcgccactgccggctcatgctggtgcccttccacatcgacgtagaagtagtactcccacgcgccgctgcgcgccgggcgcgactcgaagcggcacatcgacacaccgttctccgccagcggcgccagcagctggtacaccgcgccggccttgttaggtaccgacaggatcatcgaggtctggtcgctgcccgacggctcggtctcatagcggccaatcacggcaaagcgcgtgcgattgtgcggatcgtcctggatatgcgtgcgcacgatatgcaggtgatagcggttggcggcggactcgccggcaatcgcggccacggtcgggtcttcgctggccatgcgcgcggcctcggcattgctcgacaccgcctggcgctccaggtgcggatagttggcggtcagccagtgctggcactgcgccagtgcctgcgcatgcgcgcgcaccaccgtgacgccctgcatgtcgggcgtggatgccatcaggttgtggtgcaccttgagcgcgatctcgccgctgatcttcagcgaggtctgcaggaacaggtcgagcgtgcgcgacaccgcgccctcggtggagttctcgaccggcaccacgccgtactcgaccgtgcccgcctcgacggcacggaacacctcgtcgatgctcgggcaaggcacgcccgacacctcatggccgaagtgcgcatacagcgcctgctcggagaacgtgccggccgggccgaggaaagccacttccagcggcttttccagcccgcggcaggcggacatcacctcgcgccagatcgccgcaacgctttcgcccagcagcgggccggggttggcgccctgcaccttgcggatcacctgcagctcgcgctccgggcggaacaccggcgcaccgtacttcttcttgacctcaccgacctcgagtgccagtttggcgcggcggttcagcatcgccagcagttcgcggtcaacggtgtcgatctgctcgcgcagcgggctcagctcgaccgacagcttgcgctcggcttcgctcaggtgggtgtcgttctgctgctcgttgggcggcgtctcctcgcgcgcgggggtgcggtcttggcttgtcattttgtatgaatccggtgggccgccggggcgcggcggccggagaaaaactgacctctgcctgccggcgcactgtgcctgaggtgcgcgggcagccagcgggaatgcgcgtcaggcggacgtacgctcgaactcgcgcatgaaatcgaccagcgccatcacgccttccagcggcatcgcgttatagatgctggcgcgcatgccgccaacggtcttgtgtcccttgagttgcaccaggccgttggcccgcgcctgttgcaggaacacctcattgcgcgattcgtcgcccaggaagaacggcacgttcatgcgcgagcggcagctcggatggatctcgttgcgatagaaatcgctctggtccaggtagttgtacagcgccgacgccttggcgatattgcgctgctcgatcgcgggcacgccgccctggcgcttgagccacttgaagaccaggccggcgatatagatcgcataggtcggcggcgtgttgtacatcgagttgtgctcggccaccaggcgccagttgaatgccgacgggcacagcgggtgggcatggccgatcaggtcgtcgcgcacgatcacgatggtgacgccggccgggccgatattcttctgcgcgccgccgtagaccacctgcacgcgcgaccagtcgatcgggcgcgacaggatatggctggaagcatccgccaccaccacgcggtcgcccttgacctggccgatatcgggaatgtcctggaactccacgccgacgatggtctcgttggtgcacaggtgcacgtacccggcatcgtccgacagcttccagtcagcaatgtcggggatgcggtggaatttctccgcctcgctggtggccgcgatattgaccgcgccatagcggcgggcttcctgctcggtcttgaccgaccaggtgccggtgacgacgaaatcggccttgggctgctcggcgctgcgcagccgcatcaggttcagcggcacgatggcgttttcgccaatggcgccaccttgcaggaacagcaccttgaaattggcggggatgtgcagcaactcgcgcaggtcagcgatcgcttcgttatggatgctttcgaattcgcggctgcggtggctcatttccatcaccgaaaccccggtcccgtgccaggacagcatctcctcggcagcctgctgcagcacttcggcgggcagcgccgccgggccaggggagaagttgtagacacgttcggccaatgcacgctgcatcatgccggcaagagcgggattctggggatcgttcatgagacggggaatggaaaaatggctgccggtgttacccaagcagccattatccctcaaacccgcgccccgttgggcacccggggccaggccccggggccgcacttgcctgcaaggctgcaggcggacggcggtctgattcagtggcggatcacgccagcatcacttcgaagcggcggtgatttccttctctgcggcgtcgcgcatcgacttgccgacctgcgggccgtacttctgcatcatcgaaccccagatctcctgggtcgccttgccctggttggccatgaacttctggccggtcggcgacttcaggaaggtggtcaggtccttgagttccgccgtcgagtagtacttgccgaaggcatcgtagtgcgcctggatcgcgtccttgcggaagccatcggtgctgaaggccgagccggcgccgtcaaccatgcgctggaccgcgccgttcttcttcagcttttcgacagcggcctgcttctgcttgtcgttcagggtcttgttctcgaccagcacttgttccagcaccagcggagcttcctgcttggcgccttgctgccagttttcggcctggcccttgacagcctggtctgcctgcatgacggaaagcagttccttgatggctgctgtcttttccgcatcctgcgcatgggcgtgctgcgccatcatgaaggtcggaacgaaagcggccagaactgcgatacgtcgataggttttgagcattgtgactccctggtaaatacgtccgttttagtccggacagccgcgacgcgagttccggcgggcgtcctattgttgcaacaatttacgatttgtcttacggattagcgtccaagtcggccccggcagcaccttctgcaccgtcggcgtcttcagcctcgtcgccaccggcaccgttatcggcatcgctttcgacgatgcgctgcagcccggacaacttggtgccttcgtcaacgttgatcagcgtgacaccctgcgtggcgcggcccatttcgcggatttcagccacgcgggtacggatcagcacgccaccggtggtgatcagcatgatctcatcctcgggcgaaaccagtgctgccgccaccacacggccattgcgctcgctcgtctggatcgcaatcatgcccttggtgccgcgaccgtgtcgagtgtactcagcaatgggggtgcgcttgccgtagccgttctcggtcgcggtcagcacgctgccgcgcatgcccgcctcagcctcttcggcggtctcggccggcgccaccagcatggcgatcacggtctggccgtcttccaggttcatgccgcgcacgccgcgcgcctggcggcccatcggacgcacgtcgttctcgtcgaagcgcacggccttgccggcatcggagaacagcatcacatcgtgctggccgtcggtcacggccgcgccgatcaggtagtcgccctcgtccaggtcgaccgcgatgatgccggccttgcgcggattggagaactcggtcagcgcggtcttcttgaccgtgccgcgggcggtggccataaagatgaagtgctcggcgtcaaactgcttgaccggcaggatcacattgatcttctcgccttcggacagcgggaacatgttgacgatcgggcgcccgcgcgagttgcgcgagccctgcggcacctcatacaccttcagccagtagagccggccgcggttggagaagcacaggatgtagtcgtgggtattggccacgaacagcgtgtcaatccagtcgtcttccttggtcgctgccgcctgcttgccgcgtccgccacgcttttgcgcgcggtactcggaaatcggctggctcttcatatagccgctgtgcgacagcgtgaccaccatgtcctgcggggtgatcaggtcttcggtgtccagctcggtcgcgttcagctcgatctgcgaacggcgctcatcgccgaattcggcgcggatagcggtgagttcgtcgacgatgatggcagtaatacgctccggccgcgccaggatatccagaagatcggtgattaccgccatgatgtcgcgatattcctggacgatcttgtcctgctcgagcccggtgaggcgttgcaggcgcatttgcaggatttcctgcgcctggccatccgacaggcggtacaggccgtctgcctgcatgccgaacaccggcggcagcccgtccggacgataggaggcgcggccgcccggggtctcgccttcggcgcgcgcaagcatttcgcggaccagggccgaatcccatgccttcgccatcagttcctgcttggcgatcggcggagtcggtgcggccttgatgatggcgatgaattcgtcgatgttggccagcgcgacggccaggccttccagcacgtggccgcgctcgcgcgccttgcgcagctcgaataccgtgcggcgggtgacgacttcgcgccggtgcgccaggaagtactccagcatctggcgcaggttcagcaggcgcggctggcggtcgaccagcgccaccatgttcatgccgaaggtgtcctgcagctgggtgttcttatataggttgttgagaacaacctcgggcacctcgttgcgcttgagctcgatcaccacgcgcatgccggacttgtccgactcgtcgcggatgtcggaaatgccctcgatcttcttttcagtgaccagttcggcgatgcgttcgagcaaggtgcgcttgttgacctggtagggcagctcgtcgacgatgatcgcctggcgctggccgcggtcgatgtcctcgaagtgcgtcttggcccgcatcaccacgcggccgcggccggtgcgatagccttcgcgaacgccctggatgccatagataatcccggcggtcggaaaatcaggcgccggaatcaattcaatcagttcatccaccgtcgcctgcgggttgcgcagcaggtgcagacagccatcgacgatttcattcaggttatgcggcgggatattggtggccatgcccaccgcaataccggacgaaccgttgattagcagattgggaatacgcgccggcaggatcgaaggctctttttcagagccgtcgtagttgctgtcgaaatcgacggtttccttgtcgatgtcgaacagcatctcgtgggcgattttcgccaggcggatttcggtataacgcatggccgcggcgttatcgccgtcgaccgaaccgaaattaccctggccgtcgaccagcatgtagcgcagcgagaagtcctgcgccatgcggacgatggtgtcgtagactgcggtatcgccgtgcgggtgatacttaccgatcacatcaccgacgatacgggccgacttcttgtagggtcggttccagtcgttgttaagctcgtgcatcgcaaacagcacgcgccggtgcaccggtttcaggccgtcccgcacatcaggaagcgcccggcccacgatcacgctcatggcgtaatcgagataggagcggcgcatttcctcttcgagggagaccggaagggtttcttttgcgaatggatccattgcggcgtggtttatgcggcaggtttaagcgaatgacaggccctttagcgcgcggcacagtgggcgcctgacggctgggcaacgtgtcattctaacatgccgccaccccccgcctgccgctctccggacagcccttgcgcacacctcccgaggccctcgctgaaacccggaatccctgatgccacaaggctttgcgggcgacacaagacctatgttgcacaaacaccacaggcccaaaacccatgcggcgaatcgaatatatttacttcttaggaaacgacccttgtggcacaattccccagcgaagagccagacattgttcgaagtggagcatccaccacatcgagaatgttatactccgaagaatgtatgacttgttttcgtccatttgctcgcagtaaccctgcggtgatctcatcctgagaggagaaatatgaaaaaatttgccaagctcgcgctcgttgcagctaccgcagtaatggctgcatccgctcaagctcagtccgtcccttatgaaaagaaggcagtgaacgacaactggggcaacggtacgagcgagtacgtgtggaagaatggcacgaacgagctctgctggcgcgacagctcctggaccccggccaccgccaacgcgctgtgcgacggcgccctggccccggccgcaccggcaccggcaccggctccggtggctcctccggtcgtctcgagcgagaaggtcactttcgctgctgacaccctgttcgacttcgacaaggctgtcctgaagccggaaggcaaggccaagctggacgacctggtctcgaaactgcaaggcatcaccctggaagttatcatcgccgttggccacaccgactcgttcggttcggacaagtacaacgatcgcctgtcgatccgtcgtgctgaatcggtcaaggcttacctggtgagcaagggcgttgaagccaaccgcgtctacaccgaaggcaagggcaagcgccagctgaaggtcgatccgaagtcgtgcaagggcaaccgcaagtcccagatcgcctgccagcagccgaaccgccgcgtggaagtcgaagtggtcggcacccgcagcgcacgttaatcggattctttccgacgacgaaaggcccagcgcaagctgggctttttttttggtacagttgcccggactgtccctctcttcccttcacaccgccggcgcggctagtgccgccggccccgcatacgatgacgttgcaatcgcaaaccctttccgcagccggcgccgccaatcaggacctgccgcgcggcaatgccgatccgaaggaaatcgacaagttcagcgaactggcccaccgctggtgggacccggaaagcgagttcaagccgctgcatgagctgaacccgctgcgcctgcgctggatcgacggcatcgccggtctggccggcaagcgcgtggtcgacgtgggttgcggcggcggcatcctgtccgaaagcatggcacgcctgggcgccacggtgcgcggtatcgatctctcgaccaaggcactgaaggtagcggacctgcacagcctggagaccggggttgccgtgacctacgaagagatcgccgcagaagcgctggccgcacgtgaaccggccagcgtcgatgtggtgacctgcatggagatgctggagcacgtgccggatccggcgtcgatcgtgcaagcctgtgccacgctggtcaagcccggcggctatgtgttcttctcgaccatcaaccgcaacctgaaggcctacctgctggccatcgtcggcgcggagtatgtgctcaacatgctgccgcgcggcacgcacgactacgacaagttcatcacgccgtccgagctcgcgcgctttgcccgccaggccaggctggacctggtggaaatgcgcggcatgacctacaacccgctgtcgcaggtgtatgcgctgggcagcgacaccgatgtgaactacatgatggcgttccgccgggtggcagcatgagcgccggcatcgcaggggtcttcttcgacctcgacggcacgctggcagataccgcgccggacctggcggcggcggccaaccggctggtcgtcgagcgcggccaggcgccggtggcctatgaaaaactgcgtcccgtcgcctcgcacggcgcgcgtggactgctgggtgcagccttcggcctgcgtccggaggatgcagagttcccggcgctgcgcgatgtcttcctggactactacgaggccgacatcgcggtgcacacgcgcctgttcgacggcatgccgcaagtgctggccgcgctcgaggcagcgggcatcccgtggggcatcgtcaccaacaagatcgcccgcttcaccgtgccgttggtcgccgcgatcggcctggccccgcgcgccagcgcggtcgtcagcggcgacaccacgccccacgccaagccgcaccccgccccgctgctgcatgccgcggcaagcgccggcgtcgacccgcgccagtgcgtctatgtgggcgatgacctgcgcgacatccaggccggcaaggccgccggcatgatcaccgtcacagccgcctatggctattgcggcgacgccgagccgcccgagacctggggcgccgaccacctgattcgccacccggccgagctgatcccgctgctgttgcccgccgtggtcgcctgattgtgtcgcaggggtatcctggccgttcccggaactccccgcgacagcttgcgtccaaccgggtacaatccagcttcctcactggggccgacctggtttcgacgtgggttacaaagcagtggagggcataccgaggacccgtcacctcgttaatcaatgggaatgcaataactgctaacgacgaacgttacgcactggccgcttaattgcggccgtcctcgcactggctcgctgacgggctagggtcgcaagaccacgcgaggtcatttacgtcagataagctccggaagggtcacgaagccggggacgaaaacctagtgactcgccgtcgtagagcgtgttcgtccgcgatgcgccggttaaatcaaatgacagaactaagtatgtagaactctctgtggagggcttacggacgcgggttcgattcccgccggctccaccagtattcagtccgatgcagcacctgcaggtctagaaacccgcgatagccgaaggcttcgcgggttttttctttggcagcggataccccgccatctgttttccaggacggtaaccaaatcgcaccgcagcctttgcagttgtttacagtcatgtccccagccctggcctacgctggaatcgctgcaggccgggccatgcacggcatcagcatcacagtgctccacaggcggacgcctggcaccggctccccgttgccaggccctttgtccacgccggcgcgaccgcacatcgtccacaagagacggagttggcgatgccaatcaagtccatcgaggtcatcctcacccgagacgcgcagtgggccctcgaatacgaccccgacaacccgggaccggtctacccgtcacgcgatgccgcgattgccgcaggcctgcagctggcgatgacccacgatgccgtcctgaccattcatggcatcaatgacaaatcggacgcgttcgatttcagggaattgcacgtccctttgctccattgatggttggtgctgtcagcgcgcactggaaagcaacatccccagaattggggatgcccggatcgcgtagcggcgccatcatggtatgcgggcgtactgcgactcgcccgctaccacttgtggccctcgtcctccctggccgagggctctttctttgggtgacgcaccggtacaacgcagcgtcaccgggaagcgccgccggcgccgggcgccgcgcgctatacccccagcgcccggccatcgctgcgcgggtcgtgcgcgccgctaagctgcccgccggtatcgatccggatcgcgcccggatgaccggccagctggctttgcgcagggatcgggctcagttgatggccgcgcgcggcaagctcgttgaacaccggcaggccggcatcctgttccagcttgaggctgtcgcggctgtccgagaaggtcttgcccagcaggaagcgcgggcggcgcagagccgtcagcggatccatgccgtagtcgatcatccgtgtcagcaccgcggccagtgtctgcggctggccgtcggcgccttgcgtgccgtacagcaggtgcggccggccctgcttgaggtagatgccgggattgagggtatggaatggccgcttgccgccgcgcagcacgttggggctggcgggatcgaggctgaacgatgcgccgcggttgtgccagagcacccccgtgtcgccgacgaccaggccgctgccccagtcgaaatagacggtctgcagcatgctcacgcagcggccctcgcggtcggcggcgccgatgtagacggtgtcgccgggcttgaacacatgcggccacgccatggcgcggtccatgcggatgcggcgcgcgtgggcgtcgagattggacctggacaacagccgctccagcggcacgtcgacaaaatcgggatcggcgacgtagcggttgcggtccaggaacgccagcttcacggcctcgaccagcaggtggtaatagtctgcgctgccttcctggataccggacagatcgaaccggtcgaggatgcccatgatctccagcgtggtcacgccttgcgtgggcggacgcaggccgagcagttcgccgtcgcggtaggccacgcgcagcggcacttcttcgcgcgcctggcagcgcgccaggtcctgttcgcgcaacggcgagccggccttggccagcccggcggcaaggcgaccggcgaggtcgccctcgtagaattcgcgcccgccctgtgtcgccacccggtccagggtgcgggccagctcaggctggcggaacatttggccgggcctgggcatgcgcccgtctggcatgaagacctgtccgaagccatcccagcctgacaggtccgccgagcggaactcctgccagaagcactgtgacggcgtgaccgggaatccgttggcggcgtactcggtggcccgcgccagcagcgccgaccacgactgcgtgccgccccactggtcccggctgaaggcaaaggcgcggtcccagatcgcaacggtggcggcggcagtgagtgccgctgccgggccccgcagcggaatcgtgccggcatagcccgaggtctcggacgccgcctggccgatgccggagaacgtgcgcacattgccgccgcggtcgctgaccaccaggaaggcgtcgccccccaggccggtaaagtgcgggtatgtcacgctcagcaccgcgccgatggcaatcgccgcctcgatggcgttgcccccggccttcaatacctccagccccgcctggctggccagtccatgcgggctggtgaccatgcccgcggacgaatgcgccagccctgcgcgcccggattgcgccggctcctgcgccagttcctggccgacggcaggcaatatggtgctgcccgccagcgcggccgagccggccaggaatgcccggcgcgacgtgccggtgccgcaaggatccacttcacccagaaattccatacccacttcccccggatacgcgcggccggcccacgctggcagccgcgataacgattcgatgatggcgccgggtcatgctgcgcctggcacgcaaacccggcaggacgcgtcggctcaggtcccggtcttccagccttgccatgggcgttcggcaacggattccggtgccgcgtagtgatgcttgatccaggcataggccggtccgagcgcattcatggcgatcaccgcgccaagcgcgacaacgggatcgcccggcaccgggccgaagccgccgaacagcgtggcgaaatacgaggcaaagccaaagaacatgccggggatgaagcgcagcgtgacgaacacgcgagcgagatacatcatcgaagcgttgagcgcgaacaggatcaccatctccgccacgatcagcgctggcccggagaactgctcggccgcctggcggaagcaaagcacgatgacaaaggcaaagagcgagcccaccggcagtgtcggccagatcttcttcaggttctccggcgtggggccgcccatggcaaaggtcgcggcccagctaatgaagatggcccatggcggcaggtgcgaggcatgcgcggcgatgggaacggtggtgatggcaagcagtgaagccacgacttcggcgggcagctttctcatgatcgactccttgatggacggggaacgggcattgcggtcagtgtgggcagcaccggtgccgatggatctcgcagcgatgctgcgtgactacggtgatcttgccgcgcttgaccacccacagccgcggcgggatgtcgatcagcgcatcggccacctggaaggtatcgagcacgaccaggtcagcctggcgcccgaccttgaggccataggtgtcgtgcaggccgatcgcgcgcgcggcgttgtgcgtgcccatgtcgagcaccgcgagctggtgctcgggcacgccgaactgggccacgtgcgccagcatgttgccgatctgcagcatgtcggccttgccgaacggcgtgaaggcgttgcggatattgttcgaggaatacgccacgttgacgccgccgctgtgcagggccttcaccggcgccagcccgcggcgctggttctggacgtccttgcggccgccgagatagagatcggtggcgggcagcgtgacgatgctgatgccggcctcgcggatctgctcgatcagcggctgcagctgcgccgcgtcaagcgcgcccaggctcgtgacatggcccagcgacacgcgcccctggtagccggcttcgatggtcttctgcgcgatatatgacactgcggcaaagcgctggtcgccggtgtcgtcggcaaaatcggcatgcatgtcgaccggcgcgtcatagcgttgcgccagttcgaagaccatgtcgatatggcgcatggtgtcggcccagctcagctcgttgtacgggcagccgccgaccacatcggcgcccatgtccatggcttctgtcagcagctcgcgggtgccctgcgatttcaggatgccctcttgcgggaaggccacgatctgcaggtcgagcagatcgtggtactccgatttcagttcaagcagcgtctccaccccgatcagcccctggatcaggtcgacatcgggatgcgcgcggatcgccaccgtgccgttcctgaccgccatgtccagcacctggcgcgagcggtccagcacatcctggcgctgctgcttgcttttcaggatgccggtgacgcggatggcttcgtccagcgtgccgaagcgtgccggcaggcggcggtgcagcagagccttgtccaggtgcaggtgcgcttcgaccagccccgggatgaccgcgcggccgccggtctcgatcacttcatgcgccggcacgtcgatgccgggctcgatggcggcgatgcggccgtcgcggatggcgatatcggtcaggggcgcgtcgtcgcgtacacaggcgtcccggatcagcaggtccagctgcatggcttgtctcctcaggtcttgttatgcaggcgaagtcagggcttcgctacctgaagcgtaggtgccggggcggcatcactacatcaggattggctgaattcgacctaaggattttcctagacgcaccgcagcagactaggccgcgtccccggcttcggcgagcaggccgtggcggatggcgtagtgcaccagcccggccgtcgaagcgatatccatcttgccgagaatgttggccttgtgggtgcttaccgtcttggcgctgagcgacagcgccgcggcgacctcgttgatgcccagcccctcggccagcatctggaacacctgcagttcacgcgccgtcaggcgtgcatgcggcaacatggcatcgggctgccgggcctggctgaggagcttgtcggcaatcgccggcgagaccgcggtaccgccgcgcgccaccttgcggatggcaccgagcagctggtcggactccacattcttggtcaggtagccagccgcgcccgcgcggatagcctgcaccgcatattgcgactcgcggtacatgctcagcaccaggatcggtagcgccggatagccggcccgtatctgctggatcagcaggatgccgctgcgccccggcatcgacatgtccagcaacagcacgtccggcgtctgcgcgcgcagcagcgccaacacttcgcagccgtcggcggcttcggccaccacctgcatgtcgggcacggtggagaagatcttcttgagcccgtcgcggatgatggtgtggtcgtcggcaagcatcaggcggatcatcttgcgcctccgttgccggcagtgccggcattggggatctgcgcctcgacccgggtgccgccgcccttctcgctggttaccgccagcttgccgcccagcatcagcgcacgctcgcgcatccccagcaaacccaggctgcggcgatgcccggccctggacgcatcgatgccgcggccgttgtcggcaaccaccagccgcaaggtcccgccggccgcgctcagctccacccgcacgcgatcggcgcggccatggcggcaggcattggtcagcgcttcctgcgcgatgcgaaagaccgcggtgctgagttcggcgctgagctcgccgacgggctgcagcgccagctcgcaggcgatgccgccgcgctcggaaaaagactcggccagccactcgatcgccgcggtcagccccagctcatccagcagcggcgggcgcaggtctgccgcgatgcgctgcaccgcgtccaccgtcgaatccgcgatctgcttgagcatctgcaaatgcttgcggcacgcgtcgccggcatcggggccctgctgcgcttcgataaagctgagtcccaggcgcaatgccgtcagggactgcccaagctcatcgtgcagctcgcgtgagatccgggtgcgctccgcctcgcgcacggactgcaggtaggcggacagctcacgcagctgcgcgcgcgattccagcagctcctgctcggagcgcttgcggtcggtaatgtcgcgcgagatgccaaccgtgccgacgaccgcgccgtcctggccccgaatcggcatcttgatggtatcgaaccagcgcaggctgccgtcctggccgtgacggcattcctcataacgccggcggatgccgctggccaccaccgccttgtcggtgtccaggtagacctgtccccattcctccgaccacaccttgtccggcgtgctgcccagaatctcggcctcggaccgcccgcatgcggccatgaaggcgtcattgaccaggacgtagcgggagccgacgtccttcagccaggcctggtcgggtatgttgttcagtatggcccgctgcaggtcgacatacgtatccatgacttctccttgccgggcccttgccttgtcggcgggcgcccgattcatgacagacaagtatcagttcatgccttgcactcttcagacggcatggcctgcctgcagcccctcggactatagccagtaaccggcggcaatgcgcctgtcgttttcctcaatggcgggacgaaagcgaacggaagtccggatgacagagccttgcggcatgatgccgatcacggggctgttgggcggttcttgcgttccagtggcgtgagacttctgacccagatttaaggcaagccttatttctgccggaatgcgccacacctatcgtagtagcgtaacttcaaccggcatgccggaaagccggacggccggcccacaacctggccgtttgtgcatgcgcgcatgccatcacggcgaacctgccatgaaccgaaagcaattaatcagcgccctgcgccactggctggtggtacttgcatcccttgcggtcccgcatttcgctcaagcggcctgcagcgccacgccggcgatgccatatctgcaaacactgagcgacatggctgtcgccgccaaccttgccgtcggcagcaccattcccggcacggtgcactactacacattcagcggcacttgcacctacgtgccaccagcggttgtggccggcgctcctatcatctcctgctactatggcaacggcaccgaggtcatgccgggcgtgtactccaccggcgtccccggcatcggcatccggctgcgcaatgcagcgggccagcccatgaccaatgcagccggtgtgaaatgcgatactcgcagcgcgaaccttggttacctggacgccagcctgaactattccgtgtcggtatcagtggaatttgtgaagaccgggccgatcatctcaggcagtctcgatcctgcccagacccgattcggcttcggcgtctatgacggcagcacggcggggggactgggtggcaccagcaactacatcggcctcagcggcaacgtgacaccgcgggaaatttcctgcaacagtacctaccccccggtggtgaacctgccagcaatcagcgcactcacgctcgcaaaccagggggtgggtggcaacacgcctttcgccatccagctgacctgcagtggcggagccattgtcggcatgacgctggacgcggccgcgggtacgccggtggcctcggccggagccggcatcctcggcatcaccaatgccgggacgggcggcatggccagcggcgcaggcgtgcagatcgtcaatgcgagcggcaccgagcctgtacccctgcaggtgcgcaatgcgatgggcaacatcacggccaacgtccccgccacataccgcttcggcgcgcgctacatcggccttggcggcacgccctccccggggacggtatcaagcgcgatgatctttaccatggattatcagtagcgcgcacggaagccgcacggcgaaggactacaataggcggttgcagtccttgaaggctttcgccatgtctgaccatccccgcttcaccatcaaccgttccatggtcgcgctggtcccggaacagccgttcctggactggatccaggcggtcgatccccagccggtggccggcctcacgctagagcaggtgcgcgaggaccagagcgtgtttctgctgccggaagagctggccgatacgcacgacaacgccttgcgctgggtcgagaagcgctggcaggaattctttgaattcatgctgggcgagtggttcgatgactcgatgtggcccgaggaactgtcgctgcagatgttccgcgagtggttcagcgtgcgctaccactcgatggtgttcgacatggcgcctgacgtgccggtcatgcacgatgactgggacgacgaagacgacgcatccgagatgctgcactaggaacaaggatcaggaacccggccggcagcgcgccggcccgggtttcggcgtcgccagcgacacctcagaggaagcggtcgaggatcttgcggctgtgcttgtccagcgccgtcaggtcgcggatcaggtagtggatgccgtgcgtgtccgatatcagcagcgtgctgccggccaggcgccggattgcctcttcgccgcgcagcaccagctcggtcttgccgcgatcggtctgcaccgtccacacgctgggcgtggcgtaggtcgacacgctgacgatacgctggatctccggcatgaactcgcgcgaggcgagttccgcttcgatcatgtcgcgctctgcctgcggcacatcctccagccgcggaatccacaccacctcatgcccgtcggtgctcatcaggccgatgccgccctgcggcgcggaaatcgggaaggcgcgcaccggcaccacgccttcgtggacggtgccgtcttcggcgatcaggaccaggcggccaaaacgattgcgatctagcgtaaacatgggtgtcggcgtggtggcgggaacgtcattgggcattggcggcctccggcgtttcgatcgcttcgtcttcgccgtcctcagtgtcgacattgcgcgcctgcgcctggtacagcttgtagtatgcgccttcgcgcaacagcagctcatcatggctgccgacttcgacgatctggccgcggtccatcaccaccagccggtcggccttgcgcagtgtcgacaggcggtgcgcgatggcgatggtggtgcggccctgcaccaggttgtcgagcgccttctggatttccttctcggtggcggtgtcgaccgacgaggtggcctcgtccatgatcaggatgcgcgggttgatcagcagcgcgcgcgcgatcgagatgcgctggcgctcgccgcctgacagcgcctggccacgctcaccgaccagcgagtcatagccgtgcggcaggcgcaggatgaactcgtgcgcatgcgcggcgcgcgcggcggcgatgatctcctcgcgcgtggcgtcgggcttgccataggcaatattgtcggcaatcgtgccgaagaacaggaacggctcctgcagcaccaggccgatatggcggcggtactccgacaccggcagcgagcggatatcgacgccgtcgacgcggatcgcgccctcggaaacatcgtagaaacggcagatcaggttgaccagcgtgctcttgcccgagccgctgtgccccaccaggccaatcatctcgcccggctcgatcgacaggttcagcccgcggatcaccgcgcggttgccgtagcggaagcccaggtcgctcatgtcgatggcgccttcgaccttgtccagcttcgccgggcgcaccggctccggcacgctcgagacatggtcgaggatgtcgaagatgcgcttggcgccggcagcggccttctgcgtcaccgagacgatccggctcatcgaatccaggcgggtatagaagcggctgatataggtcaggaacgccaccagcacacccaccgtgatggcgctgtgcgacacctgccagatgccgaacacccacacgatcagcaggccgatctcggtcagcagggtgaccgtcggcgtgaacagcgaccataccgcgttgacgcggtcgttgatcgccaggttgtgcttgttggcctcgcggaagcgcgacacctcacgcttttcctgggcaaaggccttgaccacgcggatgccggggatggtatcggccagcacattggtgatctcggaccagatccggtcgatcttctcgaagccgtggcgcaggcggtcgcgcaccaggtggatcatccaggcgatgaacggcagcggcaccagcgtgaccaatgccagccacgggttgatcgacaccaggatcaccgccgtcatgaggatcatcagcacgtcggtggcaaagtccagcaggtgcagcgacaggaagacgcagatgcggtcgctttccgagccgatgcgcgccatcagatcgccggtgcgcttgccgccgaagtattccagcgacagctttagcagatgttcgtacgtagtagtgcgcagatcggcgccgatacgctccgatacgcgcgcgagcaggtaagtgcgcgcccaccccagcgaccaggccaccagcgccgcccccagcaatcccgcgaggtacagacgcaccagcccgtagtcgatcggcaccccgttctggaacgggatcagcaccttgtccatcagcggcatggtcaggtacggcggcaccagcgtggccgcggtggacagcagcgtcagcaggaagcccgccagcagctgccactggtacggccgggcaaagcgccacaggcgcagcagcgcccaggtcgacggcggggtttccagctcccggctgcattgggggcactgttcctcgtccggcggcagcggcgccttgcaggtcgggcacagcacttcgcccgccccgcccgccgggcgcgcgccggcggcatcgcgctggaattcgaactggtcggccagccgcagcgcggccggattgtaaccaagcgtgtatcgccagctcgccagccggccttctggaccgctcagttccagcgcgcccacgcccgcgtggtcggtgtgcgacaggcgcagggaggtcccgatgttccattcccgcacatttttttcaccgggagcccgggcaacgatgcgctggtcggtcacaaccagccacccttgggtaaaatgcagcttcgcgtcgaggtccagagccagtccggccaggacggtctcgccgggtcggagccacgatccggattcggtacgccagggctcgtcggcagcaggggcggtagggacaggcagggaggactgggtcatggatggcgcggcgtgcgtccagggggtacggacataacttgaaacaaatttaggccgggcacgctctggcggcccgcgaattcgcccgcagtatacataacgacgaacgcgcgagtactcctgatgcactgcacaatcacttttacacgaagaaagtcaacccgctctgtgctgtaacgttactgaaaggttaggcttccatttctcgggcggttccgcccactgcctcaagctaattcaatgaaaaagaaggacattgagattttcgatgtcatgtcgctgcgcggcccgaatatgtggacatatcggcccgtactggaggcatgggtcgatatcggggaactggaggactttccctccaacacgattccggggttccacgagcgcctgtcggcctggctgccgtcgctgatcgagcatcgctgcagtatcggcgagcgcggcggcttcctgcagcgcgtgaaggacggcacctggcccggccatatcctggaacacgtgacgcttgagctgcagaacctggcgggcatgcccggcggcttcggcaaggcgcgcgagaccccggtgcgcggcgtctacaaggtgatcgtgcgcgcctggcacgagcaagtcacccgcgtcgccctgttcaccgcccgcgacctggtcatggccgcgatcgaggaccgtcccttcgacgtccccgccgccgtggacaacctgcgccgcctggtggacgagcattgcctgggccccagcaccgcctgcatcgtcgatgccgcggacgaccgcgacatcccggcgatccgcctgtcggacggcaacctggtgcagctgggatacggcgcgcgccagcgccgcatctggaccgccgagaccgaccgcaccagcgccatcggcgaaagcatttcgcgcgacaaggacctgaccaagagcctgctggagtcctgcggcgtgccagtccccgagggccgcatggtcgattccccggcagacgcctgggacgccgccgaggacatcggcgtgccggtggtggtcaagccctatgacggcaaccacggccgcggcgtgttcaccaacctgatgacccgcgaggaagtcgagaccgcctacggcgtggccatcgacgaaggcaacggcgtcatcgtcgaacgcttcatccccggcaacgagcaccgcctgctggtggtgggcggccgcctggtggccgccgccatgggcgagaccgcgagcgtggtcggcgacggcaagtccaccatcgacgagctgatcgagctgcagatcaattccgatccgcgccgcggcaccaccgaggatcatccgctgaaccgtgtgcggctggactcggccgcgcgcctggaactgaagcgccagggcatgaacgccagctcggtaccgcccgaaggccgcaccgtgctgatccagcgcaacggcaatgtcgccttcgacgtcaccgaccgtgtgcacccgagcgtcgctgcgcatgcggcgctcgccgcgcgcgtggtcgggctggacatcgccggcgtggacctggtggccgaggacatctcgcgcccgctggccgagcagcgcggcgccatcgtcgaggtcaacgccggccccggcctgctgatgcatatcaagccggccgaaggcacgccgcgcccggtcggccgcgccatcgtcaaccacctgttccctgagtccgatgacgaccagggccgcatcccggtggtgggcgtgaccggcaccaacggcaagaccgtggtcgcgcgcctggtggcgcgcctgctgcagctgtcgggcaagcataccggcctggcctgcagcgacgggctgttcctggaccgccgccaggtggaaagcggcgaccgcgccaactgggaatcgggccatcgcatcctgatgaaccgcgcggtcgaggccgccgtgttcgagaacgacagcggcagcatcctctccgaaggcctggcctacgaccgctgccaggtcggcgtggtcaccaatttcgaccagcccgaccacctcggcgactactacgtcgaggacgaggaccgcatgtacaacgtgctgcgcacgcaggtcgacgtggtgctggagaccggcgcggccgtgctcaacgcgcgcgacgaacgcctggtggagatggccgggctgtgcgacggcgacgtgatcttcttcggcctgacgccggaactgcctgctatcgtgtcgcaccgcgccgccggcaagcgcgcggtgtacctgcgcgaaggcaagatcgtgctggccaccggcagcagcgaaaccgcgctggtggacgtggccgcggtgccgctgacctatgccggacgcgtcgcgttccaggtcgagaacgtgctggcggccgtggccgcgggctgggcgctgggcatttccaacgacctgatccgcgccggcgtggtgaccttcgatgtcggccaggtcgacgtgccgggccgcttcacgctgttcgagcgcaacggcgccaccgtggtggtcgacgacgcccacaacgcgcccgcgctggaagccctggcgaccgcgctggagcgcttcccggccgagcgccgcatggtggtctacggcgccggcatgcagcgccgcgacgaagacctggtgcgccagggcatggcgctggggcagcatttcgaccgcgtcttcctgtgcgaggaccgcagcgtcaagcgcgccctgcccgatgccgaggcgcgcgcgctgctcaagcagggcctgtacgaaggccggcgcgtgaccaagatcatcgacgaaggcacgcgcgccagcgccattgaaaccgcgctcagccagctggtgccgggcgacctgctggtactgcagtgcgacgaggccgccaccggcgccaccgtcgacctggtgcaccactggatgggccagcctgcgcgccgcgcctgacgcggccccaagctcaaccgcgcatagaagacacggaaaccgttctatggaagtctcacgtatccgggccctgcggggcccgaacctgtggtgccgccacaccgccatcgaggcgatcgtggcctgccaggatgccaccaacatgctgtcggcgctgcccggttttgaagaccggctgcgcgcccgtttccccgaaatcgggccgctgcgcccggacgaggagtcgggtgagctgtcgctggcccacgtgctggaagtgaccgcgctgcgcctgcaggccgccgccggctgcccggtcaccttcagccgcaccgcgcagacggtcgagcccggcacctaccaggtgatcgtgcaatacagcgaggaagaagtcggccggcttgcgttcgagctggccgaggccctgtgccgcgccgcgcgcaacgacaccccgttcgacctggcagacgcgctgcaccgcctgcgcgagctggacgaggacgtgcgcctggggcccagcaccggctccatcgtctacgccgccgtggcgcgcggcatcccctaccggcgcctgacgcagggctcgatggtgcagttcggctggggcagcaagcagcgccgtatccaggccgcagagaccgaccgcaccagcgccgtggccgaatcgatcgcgcaggacaaggacctgaccaagaccctgctgcacgccgccggcgtgccggtgccgctgggccgctcggtgcgcagcgccgaagaggcctgggccgcagcgcaggaaatcgacgccccggtggtggtcaagccgcgcgacggcaaccagggcaagggtgtggcggtgcgcatccgcacccgcgaggaagtgatgacggcctacgaggtcgcctcggacatcagttcggacgtaatcgtcgagcgctatatcccgggccatgacttccgcctgctggtggtcggcaagcagctggtggcggccgcgcgccgcgacccgccgcaggtcatcggcgacggcgtgcataccgtgcgccagctggtcgaggaagtgaaccgcgacccgcgccgcggtgaaggccatgcgacctcgttgaccaagatccgctttgacgacatcgcgctggccacgctggccaagcagaacctgaccgccgattccgtgccggccaacggcacgcgcgtggtgttgcgcaacaacgccaacctgtccaccggcggcagcgccaccgacgtcaccgacgacgtccacccggacatcgccgcgcgtgccgtggcggcggcgcagatggtgggcctggacatcgccggcgtcgacgccgtgtgcgagaccatgctcaagccgttcgaggaacaggccggcggcatcgtcgaggtcaacgccgcgccgggcctgcgcatgcacctgcagccgtcgtacggcaagggccgcgcggtcggtgaagccattgtctcgaccatgttctccgatggcgacgatggccgcatcccggtggtggccgtgtccggcaccaacggcaagaccaccacggtccggctgatcacccacatcatggccaccagcggcctgcgcatgggcatgaccggcaccgacggcgtgtatatccaaggcgagcgcatcgacaccggcgactgcagcggcccgcgcagcgcgcgcaacgtgctgctgcacccggacgtggacgccgccgtgtttgaaaccgcgcgcggcggcctgctgcgcgaaggcctggccttcgaccgctgcgacgtggcggtggtgaccaacgtgggcgaaggcgaccacctgggcctgtcctacatcaactcggtggaagacctggcggtgctcaagagcgtgatcgtgcagaacgtcgcgccgcacggcatggcggtcctgaacgcagccgacccgatggtggtgcgcatggccgacgcctgccccggcagcgtcaccttcttcgcccacgatcccaaccagccggccatggccacgcaccgcgcgcagggcaagcgcgtggtgttcgtggacggcgccgacatcgtggcgtccgaaggcgatactgaagtgcgcatcgcggtagccgaggtcccgctgacgcgcaacggcaccatcggcttccaggtcgataacgcgatgtcgtcgatcgccgccgcgtgggcgctgggcatcgactggccgaccatccgccgcggcctggccaccttcgtcaacgacgcgcagaccgccccgggacgcttcaacgtgttcgactaccgcggcgccacgctgatcgccgactacggccacaacccggatgccatcctggcgctgtgcaacgctgtcgagaccatcccggccaagcggcgcatggtggtgatcagcggcgcgggcgaccgccgcgacgacgacatccgccgccagacccagatcctgggcggcgtgttcgatgaagtcatcctgtaccaggaccagtgccagcgcggccgcgccgacggcgaggtgctggcgctgctgcgcgaaggcctgcagggcgcgcaacgcgccggccaggtcgaggagatccgtggcgagttcctcgccatcgataccgcgctgtcgcacctgcagccgggcgacctgtgcctggtcctggtggaccaggtggaagaggcgctggggcatatcgccagccgcatcgcgcagggctgaccggcccggcgataaaaaaaggccagctccgcagagctggcctttttctttgcgcgccgatcagtggcgtccgggcagcgacaagcgccgctccagcatatgctgcacccccgacagccccgtgctcagcacccagtagatcgccgccaccgccaggtacagaggcagcggctggtaggtggccgcgatcacctcctgcgccgtgcgcagcagctcggtcacggtgatgaccgataccagcgaggtgtccttgatcaggctgatcaggctgttggacaggcttggcaccgccagccgcagcgcctgcgggccgatcacgtagcgcagtgcctgcgccggcgtcaggcccaggctgtaggctgccagccattggccgcgcgacacgcccaggatggccccgcgcatgctctcggacaggtaggcgccgacgttcaggctcagcgtcagcacgcccgcgggcgtgggctccagcgcgatgccgatgcccggcagcccgtagtagacgacaaagatctgcaccagcagcggcgtgccgcgcatgatgctgacgtaggtgcgcgccgccgccttgagcacacggctatggctgatgcccatcagcgccaccaccgtgcccagcatcagcccgaacaccatcgaccacaacgcgaacttgatggtcagcagcgtgccctgcagcagcactggcagggaatcggtgacaagctggagagcggacatgggcgtggcggcggcagaagaatgaaaaagaaaacggcgcggcagccatgcagaccgcggcgccgcgacatgataccgcccggcttgctggccggcttacctgactggcttacttgattggcttaccggcgggcctggtcacgtcggtgccgaaccacttcaccgagagcttgccaagcgtgccgtccttgcccaggtcatccagcgcgtggttgatggcctgcgcgaacttggggttgtccttgcggaacgggatggccacctgcgtggtggcacccgccacgatcgcgcccggccgcagcggcaggttggcggtcttgaccaggtaggcgaccatcagccggtcgttcagcgcggcgtcgacgcgctgtgccgcgaggtcgcgcaggtactcaggcgcgccgggataggtcttgacgtcgatgcccggcaccgacttggccaggtcgttgaaattgctgcccaggctgacgccgagcttgtggcccttcaggtcttccagcgacttgaactggcgcttgtcgtccttgcgctggatcagctgcgcatccgagtagacgtagggcgtggagaagtccagcacttgctggcgctgaggcgtgacgttgacctggttgacgatcacgtcgaacttgcccgcctgcaggccggcaatgatgccgctccactcggtggtgacgaactccggcttcacccccagcttgcccgccaccgcacgcgccacgtccacgtcaaacccttccagctcgttcttcgcgccgcggaagccgaacggcggatacgtgccctccaggccgatctttagcacgccggcctgcttgacggtatcgagcaggtcggcggcctgcgccgcggtggacgccagcccggcgccggcaagcagcgaggcagccagcagggatttgagccagccagtacgaatcgatcgcatatgttctccagtggatgcggataagcagtgtgggggacagacagcgccggaggccgcttgtgagggccgccggccagttgtgctgctatgagcctatatcgggctcaacactaccgcaaacactatcgagcgctaaatactgattcattatggctaaataaccgccggacctgatacggccaggccgtggcgccctgcccttactggtaggccttgtcgttgggcgccgcgaacagcgccttcatgtcggccgagagcgggtagttcatgttgatgccgcgcggcgggatcggcgacatgaaccacttgttgtacagcttctcggcacggccgctggtctgcaggtctgcgatcacgccgtcggccagcttcttgaacgagggatcgtccttgcggaacatgcaggcgtagttctcggtctgcagcggcgcgccgaccaccacccagtcggccgcgctcttggccttggtgcgctcgccgtacagcagcggctcgtccatgacgaaggcagcggcgcggccggtctccaggatcaggaaggactggccgtggtccttggtgctgatcaggttcatgttcatggccttctcgccgttcatcttgaccagcaggcgctcgccggtggtgccggcggtggtgaccacattgcggtccttcaggtcggtgaactccttcacgcccgaatccttcctggtcagcatcttgatgccgtagacgaacatgctgttggagaacgccacctgcttctggcgctccaggttgttggtggtgctgccgcattcgatgtcgatggtgccgttctgcaccagcgggatgcggttctgcgaggtgatcggggtcaggcgcatctgcaggccgggcatcttcagttcgctcttcaccttgtcgacaatctgcagcaggatctcgtgcgaatagcccatgacctccttgccgtcggtgtatgagaacgggatcgacgattcgcgatagccaagcgagatcacgccgctgtccttgatcttcttcagcgtgtcgccatcggcggcatgggcggcgccggcggccagcagcagcgtggcggccgcaagcgcgcggcgggtggcggatcggtgggggtgcagtgattgcatgtggcgctccttgtagtggggcttggtcattgaggcatgtttcgtggacggcgtcgtggcttgcggacgcacgggtacggcatgaaccaacacttgcctgcggcgctagcgggacaggacgttaggcgcacgcagcatcaaaatcctctgcttcgacggccggacggcgccctgccagccggtcggccagcaggccggcgctgcccatcgccagcgtaaaaccgagcgcgccatggcccaggttcagccatagcccggacacccgcgacggccccaccagcggcaggccgtccggcgtggccgggcgcagcccggcccacggctgcagctgcgccagcggcagctcgggcacgatgccctcgaacagcgcgcgtgtctgtgccaccagcgtgccgacccgctccgggtcgatgcgggtgccgccgcgcaccaggtcggccatgcccgccacccgcagtgtattgccgatgcgcgcgtagacgatcttgttggcaaagtccgtcacgctgatatgcggcgcgcgcgtgccgctggccagcggcaccgtgatgctgtagcccttgagcggccacagcatcggccgcacgcccagcgggcgcagcagcggcacgctgccgatgccgccggccacgatcactacgtcggccggcaccacgccgctggcggtccgcacgccggtcacgcgcccaccctgctgcaccagctcttgcacgacggtgccgaagcgcatcgacaccccggcgtgcgccccgtcttgcagcaaccgtgccagcgacaggcagaagcggtggcagtcgcccacttcctcgctcggcgtgtagatggcgccggcaatctcgttgcggatgccggccagcgcgggctccagcgccacgcaggcatcgcggtccagcgcctgctgctcgcaacccaggctggcctggtagtccagcagccggcaggccgcgtcgaacgccgccgcatcgcggtgcacaaccagtttgccgcgccgcgcaaaatcgaaaccggcgccaacatcgtcatgctggtgccgggccacgaaagcctgcatcaggtcgcgtgaatagaaccccagccgcagcagcttgcgcgtggtggcttcactggtggcggcattgcaggcgcccatgaaggctgccagccagcgccactgcgccgggtcggccgcgggccggaagcgcatcggcgaatcgcgccgcagcagccagcccggcaccttggccatcacgcccggcccggccagtggcgccacatagctgtagctgagctgcccgccattggcaaagctggtctcctcggccggcccgtcgtggcgctccagcaccgtcacctggtggccgtcctcggccaggcgccacgccgtcgtcatgccgaccacgccggcgcccacgatcactacctgcattgccatcccttgattgctttttcccgatccggcaaagcgtagtgcaggcggcgcggattgcccaatgcgaatacgtgccagaatatgtcatcaggctatggatgcctgcccgcttcccggattgccatgcgcttgcgccagatcgaagtcttccgcgccgtgatgctgaccggcaccgtcagcgaggccgcgcgcctgctgcacgtgtcccagccggtggtcacgcgcgtgctgcagcacgccgaggcctcgctcggctttcgcctgttcgagcgggtgcgcggccggctgcaggccacgcccgaggccaatgcgctctatggcgatgtcgaaaggctatatggcgagatcgagcgcgtgcgccgggtctcggaaagcctgcgccacaagggcgccgggcggctgcgcgtggccgccacccccagcctggccaacccgctgctggtgccggcggtgcggcgcttctgcgcgcgccacccggacacgcaggtgcaggtgctgacccaccataccgacgagatcgtcggggcgctgctggccaaccagatcgacctgggctttgcctttgcgccgccgggccacgaggccatcgccagcgagccggtggccagcggccgcatgctgctggcggtgccgcgcggccagccgctgcccgccggcgggcgccgccaggtggtgccgatgcagcggctgatggagcgcgccttcatcggctatgacgacaacagctcgctcgggctgctggtgcgccagaccctggcccggcacgcgctggagccgcgctcgacgctggaggtgcagacctattcgctggcgctggccctggtcgatgcggggctgggcgtgaccctgctggaccagtacaccgcgctcagcgccagccccgagcgggtcgcgctgcacgacgtggcgccagtgctgccgttcgaggtccagatgctgcgcgccagccatcgcgccggctccagcctggccgacgacctgcgcgcgcagtttgcgctggccgccgcggaactggccgcaacgctgccgcagcggctggaagcgccagccgccagctttgacgccacgccccggagccgcgatcgaggtccgcctgatgtctgactgatgtccgattgacagccgcgcgcggcgtgcaccatcatcaagccgcctgcaggcacaacctgcgtgcgccaaaccgcctatgttcgtcctgaccctgatcgcccttgtccttgtcagcgcctttttctcggtctccgagatcgcgctgaccgccgcgcgccgcaccaagctgcaagtcctgtcggagcgcggcgatggccgcgccacgcgcgtactgcggctcaaggaagagcccgggaatttcttcacgatcgtgcagatcggcgtcaacagcgtggccatcctggccggtatcctcggcgagaaacatgtatcggacctgctgctggaaacgctgtcgccctatatgcaggtggtccacgcccagcgcgtggccaatatcggctcgttcctgatcgtgacgctgctgttcatccagtttgccgacctgatccccaagcgcatcgccatgaccttccccgagcggtgcgcggtggcggtgatcgacccgatgctgacgctgctgcgcgtgctcaagccgctggtctggatcttcaacgccgccgccgatgccacgctgcggctgctgcgcctgccgaccaagccggtcgaccagatcaccaccgaggacatcgccgcgatggtcgatgccggcgccgaagccggcgtgctgcacaagcatgaactccacctgatcgaaaacgtgttcgagctcgagttcaagagcattaccgcgatcatgacgccgcgcgacgacgtggtctacctgagtctcgacgaacccgccgacagcgtgcgccgcaagctggtcaaccagccgcacgcgcaatacccggtgtgcgggcacgacctcgacgacgtgcagggctatatcgattccaaggacatcctgcagctgctgctggccgacgagagcgccaccgtgatcaacaatatcggccgccaccacgacaagaacgtgctggtgatccccgacacgctgaccctgtccgaggcgctcacgcgcttccgcgagatgcaccagaactttgccgtggtgatgaacgaatacgggctggtggtgggcatcgtcacgctggacgatatcgtcggcgcgctgatgggagacatcctgtattccagcgaggacgagcagatcgtgcggcgcgacgacagctcctggctggtcgacggcctcaccccgctggtggacctgaagaaggcgctggatctcgacaccctgcccggcgaggactatgtcgacaccgcggccgggctggtgatctattcgctcaagcgcatcccgaagaaatccgagtcgatcaccgtggcgggctatcgcttcgaagtgctggacatcgaccatcacaagatcgaccagctgctggtgtcgcgcctgccgcaggcgccggaagccgaagcgccgccacggctggcgtaggcgcgacggcctgccggtagcgctccagcgtatccggcagccggaaccacgccacatagctgaacgccaccaccaccgctgccgccgccaccgcgcccagccgccatggcgccaccgattccttcggcgccggcacgtgcagcgtgcggtaagccgtgccgagcagcgcgatccatgccagccccagcgcatagcctgcagcgacatccgacagccagtgcatgcccaggtacagccgcgataccccgatcgccgccaccgccaccacggtcagtgccagcaccgggatgcgcacgcgccacggctggcgcaggcacatcaggaaggccaggaagccataggtgaccatgctgctggtggcgtgtccgctggggaaggaatacgattccaggccgctgtagatgctggccgggcgcatgcgcgccatgcccagcttgagcgccatcacgcaggcacgcgcccccagcagcgcggcggcccagtacagggccacggtccaggcgcgccgccagcacagccacgcgaacaccgccacgcccaccgccagggaaatgcgcgcgccgcccagttcggtcactgccaccattgcgatatcgagccagtcggtacgcaaggcacgcagccatgcaaacacgatctggtcgatgcgcaccacgcccccgctttctgcgacctcgccggccagccagaacagggcgctgccgcaggccagcagcacggcgccggccagcaggaccaccagcagctcggccatgtcgcgctcgagcatgcgcagcgtgagcgtgctcagccggcgcggctgtgcggccacgcgcgcggacagtgcgccggccccccacacgcgccaccggtccagccagcgcaccaccggccgcaacagcgccaccagcagcggcaccaggctcagcagcagcaccgtcaccagcgtgaacagcgccagcagcccgagcgccgtgcccggcgtgagccaggcctcggcgaaggcgctcgcgcctgccggcacgtcaatcacgggacgcacccgcggcgccgacgatgcgggcgatattggcgcgcgccggcgcctcgcagtcggcaaaggcgtcggtcaggaatagtcgcgggcgctgcgccagcttgcccaggaacgccgcgcggcggcgcatgaattcagtctccagcgcctccccctggagaccggtgcgggcggccagcatggcgcggttctcggcgaacacatccaggctgtgggcatcgaacatttccgaagccgcggccagcctgagcaggtcgagatcgagcacggtgtcggcgccggcaatgctcgggccatggccgcgcgtatcgagcacgatctgcgcggcacgctccagcaccgcgcggtcctcgccgggcgccaccgtttcgatcagcgcggctgaggcggcttcgttgtgcccgcaccccgccacatagaccgcgtcgtggcacagcaccgccagcgcctgcgcgcggtccagcgcaatgccgcgcgcgtgggcggtctcgaacatctccaggatatggcggcggtcgtggtagtgccggtacggcgtatcgtgcagcgccagcacatcgagcaccgcctggcggggcaggaagtccaggcacgccagcgccgcgggccaggcgggcgcaaagcgcggcacctcgccctgcggcgtggccaccggtgcgctgaacacatcggcgcggcgcacccacagcaatgagggatcgcgcatcgcgcggtagaccaccacgggcgcgagatcggcctcgaagcggccgatgccgactgccgtgtaggcgccgcccttgtagtgccggtacggcatgccggcgaccaggttggggtcggccggcagttcggccggatcgccgtggaaggccggtgctgggggttggctggcgggtggctgtgtcatggtgcggcatcctgcgttgcggatcgccatgatagtgcacccggcagcgcgtccggtacgcgggccagtgccgcggcccatgcccgccgcatgaaaaaccggccgcggaaaaaacaaaaccgacgcgcactgtcgtgggcgtcggcctgagttttactacactgttgttgcctgccggtggtcgattccgacagcttcttgttttggcggagagggtgggattcgaacccacggtaccgtcgccggtacgcctgatttcgagtcaggtacattcgaccactctgccacctctccggtaacttgttgccgtgtggcgaaaccgaaattatagccatgtccggccagccgatgcaataggctggcagcggattttttcggttcgctttacatctccggttccaggcgggtgatgccgcccatgtacggctgcagcgcggccggcacggtgaccgagccgtctgcgttctggtagttctcaaggatcgccaccagcgtgcggcccacggccagcccggagccgttgagggtgtgcaccagctccggcttgccctgccccgcgcgcatgcgcgcctgcatgcggcgcgcctggaagtcgcccatattcgagcacgagctgatctcgcggtaggtgttctgcgcggggatccacacttcgaggtcgtaggtcttggtgctgccgaagcccatgtcgccggtgcacagcacgatggtgcggaacggcagctccagcttcttcaggattgcctcggcgtggccggtcagttgttccagcgcctcgaacgactgcgcggccggcaccacctgcaccagctcgaccttgtcgaactggtgctggcgaatcatgccgcgcgtgtccttgccatacgagccggcctccgagcggaagcacggcgtatgcgcgacaaagcgcagcggcagcttctcgccggcgacgatggcgtcgcgcacgatattggtcagcggcacctcggcggtcgggatcaggtagaagttctcgatgcgctcgccgtcttcgctgccgaccttgcgcggcaccttgaacaggtcttcctcgaacttgggcagctggccggtgccgcgcatcgaggcggcgttgaccatgtacggcacgtacatctcggtgtagccgtgttcctgcgtatgggtgtcgagcatcagctggaccagcgcgcggttcatgcgcgccaggccgccgcgcaacatcgagaagcgcgaaccggtgaccttgaccgcggtgtcgaagtccaggcccagcttatcgcccacgtcgacgtgatcgcgcacggcgaagtcaaactggcgcggctcgcccacgcggcgcacttcaacgttctgggtttcgtcgttgcccaccggcacgctttcatgcggcaggttggggatggccagcatcagctcggccaggtgcgcctggatctcgtccagccgcgcggccgaggccttgagcgtgtcgccgatgccgccaacttccgccatcacggccgaggcgtcctcgcccttgcccttgagcatgccgatctgcttggacaggctgttgcggcgcgcctgcagttcctcggtctgggtctgcagttgcttgcgttcggcctcaagtgcctggaacgccgcaacgtcgagttggtagccgcgcgtggcaaggcgttgcgccacggcgtcgatgtctttgcggaacagctggatgtcgagcatgttgctttggtgaagtgcagggccagcgacatgccggcggacccgccattttactgcaccggccccgtccggcgcgaaccgggcgatgccaggccagcgccgtgttgccggctcacgccaccgctcactccccgcccttgccgccgtcctttggcttggccacgcgctgctcgcgatgccaggcggcatccagctcgcgcaggtggcgcagcttctcggcgatcttgccctccagcccgcgcggcaccggctggtaccagtcctgggccttgaggtcgtccgggaagtagtgctcgccggcggcgtaggcctcgggctcgtcgtgcgcgtagcggtaggcgtggccgtggccaagctccttcatcagcttggtcggcgcgttgcgcaggtgcaccggcaccgcgcgcgacttgtccttggcgacgaaggcgcgcgccgcgttgtaggcgttgtagccggcgttggacttgggcgccacggccaggtagatcagggcctgacccagcgccagctcgccctcgggcgagccaaggcgctcataggtctcggccgcgtccagcgtgatgcgggcggcacggggatcggccaggccgatatcctcccatgccatgcgcacgatgcgccgcgccaggtagcgcgggtcggcgccgccgtcgatcatgcggcagaaccagtacagcgccgcgtccgggtccgagccgcgcacggacttgtgcagcgcgctgatctggtcgtagaaggcgtcgccgcccttgtcgaagcggcgcaggttttccgacagcgcgctgcccagcagcgcggtatcgatctgcgcggcgccggcggtgcgcgcggcacgcgccacgatctcgatattgttcagcagcttgcgcccgtcgccatcggccgaggccacgatcagctgcagtgcttcgtcctgccagctcaggtcgcccgcctgtgcgccgagttcttcgctggcgcgcagcgccagctgggtcagctcggcatcgtccaggctcttgagcacatagaccgcagcgcgcgacaacaaggcaccgttgacttcgaacgaggggttctcggtggtggcgccgataaaggtgaagagcccgctttccacatgcggcaggaaggcatcctgctggctcttgttgaaacggtggacttcgtcgacgaacaccagcgtgcgccggccgtgcgcgcgaaactgctcggcgcgctcgaccgcctcacggatgtccttgacccccgacagcaccgccgacagcgcgatgaactcggcgtcgaaggcactggccatcagccgcgccagcgtggtcttgcccacgcccggagggccccacaggatcatcgaatgcggctcgccggactcgaacgccacgcgcagcggcttgcccgcaccgagcaggtgctgttgcccgatcacctcgtcgatggtgcgcgggcgcaggcgctcggccagcggttgccgggaacggtcgggagtatcggaaaacagcgtgtccgccacggtattcaagccttgtgaatgcagaacgccacagtgtagaccatcggcgccctgcccctgcgtggcacgctaggcggcaaatgccaccacatcctcgatctcgacacggatgccgatgcgctcgcccacggcatggttgtggtgggacggcaccagcgccagtacgcggccgccgctggccaggcgcagcgtgtacaggatctcggcgccgcggaaggccttgtggaccacctcggcgcgcatcgggctggcgtcgtcgtggatgatgtcatcggggcgcaccagcacgtctacggcggcgccagcgggcagcgccagcggcgccgcggggcgcagcaggcctagttccagttcaatctccgcggtctcgcgcaaccgccccgccatcagcacgccctgcccgataaagcccgcgacaaagcgcgatgtcggccggtggtagaggtcgtgcgcgctgccccactgctcgatcaccccgtcgtgcatgacgccgatctcgtcggccatggcaaaggcctcgtgctggtcgtgggtgaccaggatcgcggtggtgccctgcgccttcaggatcgcgcgcacctccaggctcaggcgttcgcgcaggtcgacgtcgaggttggagaacggctcgtcgagcagcagcagctccgggcgcggtgccagcgcgcgcgccaacgccacgcgctgctgctggccgccggaaagctcatgcggatatttgcggcccgcgccggccagtccgaccagctgcagcacctcgtccacgcgcgccgcgcgcccggcgcggctggcgcgcaccaggccgaaacccacgttggccgccacgtccaggtgcgggaacagtgcatagtcctggaacaccatgccgatgcggcgctgctccggcgccagcatcgccccggacgacgacacgacctgcccgtccagcacgatgcggccgtcctgcagcggctcgaaaccggcgatggcacgcagcaccgtggtcttgccgcagccgctgggccccagcaggcaggcgatattgccgcgcgccaccgagaacgacagccccttgaccaccacatggcggccaaaagcgtgacggatatggtcgacctcgatgacagcggcgccagcgccagtgacgtcagcaacgcctgcgcgggtcgccggccggctgcgggcctgggcgccgggcaagcgtgaataggaatcggttcgcatgtgcgcattatagggacgcggccgggggccgtgagcgcctttcggggcaaatgcgtgccccacattgctagaatgcggcagccgcacgctgtgcgcggcacttccgcccactttccgacgcatgctcctgtccagccgccgccgcttccatcccctgaccctggccaccctggtgatggcgctgctgatcgccgtgccggtgctggtgatcgcctcggccgtgctgctgcccgccggcgacacctggcgccacctgatcgacacggtgctggcggaatacgtgctcaacaccgtctggctgctgtgcggcgtcgccgtgggggtattgctgctgggggtgaccaccgcctggctggtatcgacctaccgtttcccgggccacgccgtgatggaatgggcgctggtcttgccgatggcgatgcccgcctacgtgatcgcctatgcctacaccgacgcgctgcagtttgccgggccggtgcagggctggttgcgcgagctgaccggctggaaggcgcgcgagtactggtttccagatatccgctcgctgggcggcgccatcgccctgttctcgctggtgctgtatccctacgtctacctgaccgcgcgcgccgccttcctgcagcagacccagaacacgctggaggccgcgcgcctgctcggccacggcacctggagcaggctctggcgcgtggtgctgccgctggctcgccccggcatcgttgccggcaccgcgctggcaatgatggaaacgctggccgacttcggcaccgtcgcctactttgccatcccgactttctccactggcatctaccgcgcctggttctcgcttggcgacaagaacgccgcggcgcagctgtcggcatgcatgctgctgttcgtcgccgccatcctgctgatggagcgcgccagccgcggccgcgcgcaggtctacggcaaccagcgccgcgccgtggcctggacgctggacggcgcgcgcggctggctggcgctggccgtatgcatggtgccggtgctgctgggcttcctgattcccgcgctgatgctgtgccgcatggccttcaccgacggcgatgcgcagttcggcgcgcgctttgtcgggctggtgcgcaacagcttcctgctggccagcgccaccgcgctggccgcggtgacggtcgcgctggcggtgggctacgccgcgcgcgcggccaacggcaagcgcagttggctgatgcgcggcctgacgcggctgtgcggcatgggttatgcgctgccgggctcggtcattgccgtgggcgtgctggtgccggtggcgcggctcgacaacgcgctgtcggcctggctgcagcagcagttcgggctctcggtggggctgctgctgaccggcggcatcgccgcgctggtctatgcgctgctggtgcgcttcctgggcgtggcgctgcagaccgtcaatgccgggctgggcaagatcacccccagcatggatgcggccgcgcgcagcctgggccacggccccggcgccacgctgcggcgcgtgcatttcccgatgctgcgaggcagcctgctgaccgcggcactgatcgtctttgtcgacgtgatgaaggagttgccggccaccttcgtgatgcgcccgttcaacttcgacacgctggccgtgcaggcctacaacctcgctgccgacgagcgcctgaccgaggccgccaccgcctcgctggtgatcgtggccgtgggcctgctgccggtgatcgtgctgtcgcgcacgatccggcgcgaagcgcagcgctgagcctcccacgcttcttgccctaaagtcgcgccacaacgcgccgatagcctcttatggcccggcgttcgcccgggagcgaacagcggcaggcctgccgcgcaagaacctatgctgcgatatcacatcctgctgttcaagttgaaccggctgagccgcaacaagctgagcggcgtggaagaagtctcgctggccggacagctggccgagatggtcgattcggccgacaccgccgcgcgcgtcatcgccgacctgttcgatcacgccaacccgcaggtgcgacgcatcgcgctcaacgcgatccgccgcgcgcggcagttctcgtcgcccgagctgcagcccgcgctggtgcgccgcatggccgatgccgaagcggtgctgcgccatgacgccgtctggatcgtgcaggaaacccggatggatggcgccgaactgcgcgccgcgctgcgccgcgttgccggcaaggtgcaactgccgtgggacgccgagcgcgcccgcgccaatcccggcgacatcgcgctggccgcgcaggtgcgcgcccgcatggcgctggacaagctgctggaaaagagtgcggccgaacgcaaccaggcactggccgcgatggcgttgggcgggacctcggaccagccttatgccgaaggcacggtcggccacaagggcctgctgcaccgcgcactggtgcggcgacaggcggggcggcggctcaacagcagcgtgaagctgacgttccgcaagctggagcccacgcaggtgactgggaacaagcggttcctgctgtagcaggaaccgcccctactgcaaaggccgtggcggcttacttgaaaccggcgcggtccaccagcttctgcgcttgcggctggtacttgcccagctcggccacgttgatggtgtcggccttgaacgtgcccagcgcttccagcgccgggttgctgaccttcacgccctgcaccaccggccattcgttgttgccgtcggcaaagtagcgctgcgcctcgtcgctggccaggtactccaggaacttgaccgccgcttccttgttgggcgcatgcttgagcatgccgccgcccgagacgttcatgtgcacgccctggctcgactggttcggccaaagcacgcccagcttgtcggccacggccttgtcttccggcttggtcgacttcagcagacgcgcgatgtaataggtgttggcgatggccacgtcgcactcgccggcggcaaccgccttgagctggtcggtgtctccgcccttgggcacgcgcgccaggttggcggccacgccgcgcgcccactgctcggtgcgtgcctcgccatcgtgggcgatcaggctggagaccagcgacaggttgtagacatggccgctggaacgcgtgcagaccttgcccttccacttgggatcggccaggtcttcatagctggcgatatcgccggccttgaccgcggtcttgttgtaggcaatcacgcggccgcgcgccgagaagccgaaccattcgccattggggtcgcgatagttggccgggatgcgcgattccagcgccttcgactttaccggcgcaaacacgccagcctgctgggcgcgccacaggcggccgatatccaccgtgatgaacacgtccgccgggctgttggcgccttcattgcggatacgctccagcagcgggtcttcctggccttcgatgcggttgatcttgatgccggtctgcttggtgaagttggcgtacagcgcttcgtccgtctggtagtgacgcgcggtgtagaggttgagcaccttttcctgcgccgcagcggcgagcggcagggtcagcagggccagcgccgcagcgcgcggcagcaaggttcggatagtggtcttcacgcggatggctccccagcatggtttgggcagccgccggggaccccgaggccgcccggttattggattccggtcagcgggaaacaatattgattcttgttcaggcggtcaaattacatttctgtcatgttgacgcccgttgaccgatcaattccagggagatgcccgcactaacgtaatcgccccctgtgcgaagacgaaccggcaaggcgggcgccgaaatctcagccgcggcgtacccagaccaccttgccagccttgacgcccagcgtgcggcgttgcgggttgtagtccatggtgccggggaactgctggccgtcgcgctcgcccagtcgccacgcgcagccctgcagcaggccgatggcttcggcctcgggcttgccgaccaaggcatcgtcggccagcttgtcggcggcacagccctccggcgtgccacgcgcgccttgcgggccggtcggcgcgggcgccgcgcaagccgccagcagggccccgcccgccgccagcatggcggactggcgcagccaacgccggatggttcgcttcgcaatcatgtcgttctcctgatggatttggcgagtatgaggatgctgggacacgcggcacaccgcggcgttcagcttctttgcacaccgatatgaaacttttgccagattacgctgtattgcgcacattttcagtgtggcttcggcttgatctggataaaccgagctataagccatgcgtgctatcagtgagtaagcgggccggcaacgtcccgcaccactccacccaccgcgcatccctctgcgccttccctgggagcaacgcatgaccgcaatgatgaaagccgccgtttttgtcgagcctggccggatcgaactggcagacaagccgatcccggatatcggccccaacgatgccctggtgcgtatcaccaccaccaccatctgcggcaccgacgtgcacatcctcaagggtgagtacccggtggcgaagggcctgaccgtgggccatgagcccgtcggcatcattgaaaagctcggcagcgcggtgacgggataccgcgaaggccagcgcgtgatcgccggcgcaatctgccccaacttcaactcctacgcggcgcaggacggcgtggcctcgcaggatggcagctacctgatggccagcggccagtgcggctgccacggctacaaggcgaccgcgggctggcgcttcggcaacatgatcgacggtacccaggcggaatacgtgctggtgcccgacgcccaggccaacctgacgccaatccccgatggcctcaccgacgagcaggtgctgatgtgccccgacatcatgtccaccggcttcaagggcgcggaaaacgccaatatccgcatcggcgacaccgtggccgtgttcgcgcagggcccgatcgggctatgcgcgaccgccggcgcgcggctgtgcggcgccaccaccatcatcgccatcgacggcaacgaccaccggctggagatcgcgcgcaagatgggcgcggacgtggtcctgaacttccgcaactgcgacgtggtggacgaggtcatgaagctgaccggcgggcgcggcgtggatgcctcgatcgaggcgctgggcacgcaggcaaccttcgagcagtcgctgcgcgtgctcaagcccggcggcacgctgtccagcctgggggtctattcaagcgacctgaccattccgctgtcggctttcgccgcggggctgggcgaccacaagatcaacaccgcgctgtgccccggcggcaaggaacgcatgcggcggctgatcaatgtgatcgagtcggggcgggtcgacctgggagcgctggtgacgcaccagtacaggctggacgacatcgtcgcggcctacgacctgttcgccaaccagcgcgacggcgtgctgaagatcgccatcaagccgcactgacggcggcgcctcgggttcagcccttggcccgggcggccagcgcctgcatggcgtcggccggcagcggcccatggcaggtgcgctcgccgccggactcgctgaccaccagccatacctggtccggctggcccttcggatgcaacagccaggccgggccgcgcgcattgctgctgggcggcaggtcttccagcacgccggtgctggccgactgcagcatcaccgcgcactcggtggcggacacgcgcgtggccttgagaaagccagaattgcccagcacttcgggcaatcccgagtccggtgcgcgcaggaaggaatcgacatcgaacttgctggcgccgccgccgctgctggcacatgccgccaacagcagcgcgccggcactggccagcaacacggcgtgctggctgcgccgcgaacggatggtgactgcgggaccttcctgcggatcgttcatggcgggcctcactgcttcatcacatcggcgcccttgggcaccgtaaaccggaatgcatcggccgccagcggcgggttcttctgcatgcccgtgaaggtcagcagggtggtgttgccgaacgcgtcgcgcagttccatggcttcaagattgccggccttgaagccgatgccgatgcgctcgaactgcgtgtccttggccttgggcgtcagctccagccactctacgccgtcgcgcgtcgggccgttcttgaccacgaagttcttttccaggtcgttgctgccgaacaggatcgccgccgggctggagccgagtgcgccgtcgagcttgcgctcggtgacctggttcaggtccttgtcatagatgtacagggtctggccgtcggcctgcagcagctggtcgtagggcttggtatagcgccaggtgaacttgcccgggcgcgagaacacaaaggtgccgctggaggtgccggtcaccttgccgttggcgccctgccccttgacctggcgctgcgtgaattcgccgcgcgcgctcttcacgccggtgacaaagctctgcaactggtcagtggctgcggcatgggccggcgcctggatggcaaacatcgccagcgcggcgcaggccgacacgatgatgcggttgcgcatggttcgggtcctggtagttatggagggcgtcgccgcgtgtgctgcgcccaacgctgtaggccgctgcacgggcaacttgtctgtttagagcaggcggcagccggaggattccacacggcccgcgctcgcgggtaaccggatattacggcagacaccgcgggaaccgcgcctgatctgcggcgatgttgtcttttccgtgatgacatggctgaatgagaccacgcaagacaaggttgacaaggccaccgcgccgctcgccaccgggatgaccgagatggaccgccgcctcacggatcgcctcgatgcggccgatgcgcgcatcgagcgcctggaagtgcgcttcgacaagcaatttgaaaccatcaacacgaagctcgacgtgctgctcaagcgccgctagcacacatcacaggccgcatgggaggagcgctggcagcgctcagtcatcgtcacgcgcggccgcaccgccaccctgcgccagaatgtcacgattgccgttgcccgacatcgccgacaccagccctgccttctccatatcctccagcagccgcgcggcacggttgtagccgatgcgcaggtggcgctgcaccagcgagattgacgcgcgccggttcttcagcaccacctcgaccgcctggtcgtacagcggatcggcctcgccgccgccgccgccaatgccggcaccgccgccaaacccgtcgccgccgccggcgtcatcggtcaggccgccttcgaggatgccctcgatgtagttggcttcgccggattccttgagcttttccaccacgcggtggacttcctcgtccgagacaaaggcgccgtgcacgcgcaccggcaggccggtgcccggcgccaggtagagcatgtcgcccatgcccagcagcgcttcggcgccctgctggtcgaggatggtgcgcgagtcgatcttgctgctgacctggaacgcgatccgggtcggcacattggccttgatcaggccggtgatcacgtccaccgacggacgctgcgtggccagcaccaggtgcaggccggccgcgcgcgccttctgcgcgatgcgggcgatcagctcttccaccttcttgccgaccaccatcatcaggtcggccagctcgtcgatgacgatgacgatggtgggcagccggtccagcggctccggggcgtccggggtcaggctgaacgggttggggatcttttcttcgcgggccgcggcctcgtcgatctttttgttgtagccggccaggttgcgcacgcccagcttgctcatcagcttgtagcggcgctccatctcgccgaccgcccagttcagggcattgccggcctggcgcatgtcggtcaccaccgggcacagcaggtgcgggatgccctcgtagacgctcatttcgagcatcttcgggtcgatcaggatcaggcgtacgctttccgccttggccttgtacagcagcgacaggatcatcgcgttgatgccgaccgacttgcccgagccggtggtgccggccaccatgcagtgcggcatgcgggccaggtcggccaccatcggcttgccggcgatgtccttgcccagcgccatggtcaggctggacgaactctcgttgtagacctgcgagccgaggatttccgacaggcgcacggtctggcgcttcgggttgggcagctccagccccatgtagttcttgcccgggatggtctcgaccacgcggatcgacaccagcgacagcgagcgcgccaggtcgcgcgccaggttcaccacctggctgcccttgacgccggtggccggctcgatctcataccgcgtgatgaccgggcccgggtaggccgccaccaccttgacctcgacgccgaagtccttgagctttttttcgatcaggcgcgaggtgaactccagagtctcggcgctgacggtttcctggtgcggcggaatcgggtccagcagcgacagcggcggcaggtccgagtcctggatatcggcaaacagcggctgctgcttctcacgctcgacgcgctcatgcttgggcactgcctgcgggcgcacgatctgcaccggcgccgcctcttcgatgcgcacgcgctgcacctcgacggtttctttgcgctcggtcttggcggcctcgccgatgatgcggtcctgcttgctctcgcggcgggccttgaagcccaggaacagggtctcgacaaagccgccgacgtgctcggccacggtcagccaggagaaatggaagaacagcgacagcccgatcgccagcagcagcaacaacagcagggtcgcgccggtgaaacccagcgccacctgcagccagccgcccagcagatcgcccagcaccccgcccggcgcgcgcggcagcgcggcgcgcaacgggtacatgcggatcgcctccaggcccatgctggagaacagggtcagaccaaagccgatccagctgacggtcacgccctggcggtgcaggccggggtccgcgcgctcgggcagctcggcggtcagcgtgcgccagccgcgccagcagcggcgcaccagcagcaccgccagccagtaggcggaaaagccgaagatgaagaacagcacgtcggccacccaggcgccgacgcgcccgcccaggttgtggatatcggccacctggttggcatgcgaccagccgggatcggtcttgctgtagctggccagcacgcacaggaaacccagcgtgacggccagcagcaggaaccagcggacctctcccagcagtttgccgatgcgggatggcaaggctgagggatcggtgcgggtggtcgtggtagctcgggccatgcctggttaagactcgcgtgtaaggtgattccggatgcgtttcgggccgatgccggcagcggtcagtggttgctcaccaggtgactgacggtcatcgtggcggccattttaacgtggcccgagactatcgcactcattggaatttgcaacagtgagcaaatgcggctcctcttataatgtcgctttcgagcaatgccggtgggcagcatgccgcaccggccacaggaacgcatcatggcaaaacacgcaaaagtgctgattctcggttctggtcccgccggctataccgccgcggtctacgcggcccgcgccaacctggaaccggtgctgatcaccggcctggcacagggcggccagctgatgaccaccacggacgtcgagaactggccgggcgatgccaagggcgtccagggtcctgaactgatgcagcgcctgctggcgcacgccgaggaattcaagaccgaaatcatcttcgatcacatccacaccgccaagctggtggacgacaacggccagccggcccgccccttccgcctgatcggcgacgccggtgaatatacgtgcgacgcgctgatcatcgccaccggcgcctcggcgcagtacctgggcctgccgtccgaagagtccttcatgggccgcggcgtgtcggcctgcgccacctgcgacggcttcttctacaagaaccaggaagtggccgtggtcggtggcggcaacaccgccgtggaagaggcgctgtacctgtcgcatatcgccagcaaggtcaccgtgatccaccgccgcgacagcttccgcgccgagcctatcctggtcgaccgcctgctgcagcgtgaaaaggaaggccgcgtggtgatccgctacgacagcgtgctggacgaggtgctgggcgatgaatccggcgtgaccggcatccgcgtgcgcggcaccaagaccggccaggccgaggacctgaagctggcgggcgtgttcatcgccatcggccacaagcccaacaccgacctgttcgaaggccagctggccatggaaaacggctacctggtgaccaagtcgggcctgcagggcgacgccaccgccaccagcgtgccgggcgtgtttgccgccggcgacgtgcaggaccatgtctaccgccaggccatcaccagcgccggcacgggctgcatggccgcgctggacgcccagcgctttgttgaagccctgaagtaagcacgcccctccgccggccgggccgccacggcccgccggcgcgtcccctgcggcatctcctgccgccccgccagtcgatataatctgcgccgagcccccggagatttttcaatgacgcacggcgccagcaaacccgaccgaccgccccaacgtttcggcctgaacgaccttgccaggctgcgcgacaccctcaaggccgataccgagcgccgcgaagccgagcgcgtggccgccgagcaggccgcccggcgcgcccgtgaagaggccgacgtcttccgcaccagcgtgggccaggtcagccagctgcgcgaccgcaaccgcgcccccctgcccgccagcaagcccgccccggtgccggtgcagtcgcgccgcaacgacgaagccgtgctggcggcctcgctgtccgatgatttcgacgtggaaagcctgctggaaaccgacgagaccctgtcgttccgccggcccggcatcggcatggacgtgatccgcaagctgcgccgcggcgaatgggtggcgcaggacaaggtcgacctgcacggcctgcgcagcgacgaggcgcgcgaggcgctggccgagttcctgcgccgctcggtgcgcaacggcgtgcgctgcgtgcgcgtgatccacggcaagggcctgggctcgcccgacaagctgccagtgctcaagggcaaggtgcgcagctggctggtgcagaaggaggaagtgctcgccttcgtgcaggcgcgcgaggccgaaggcggcgccggcgcgctgatggtgctgctgcgccagccgcgcacctgacgcatcgccacggatgcacgttccgcttgaattgctgatggggcggctgcccctgatcctccacatcatggaggtgatcggcgtgctcgccttcgcggtctcgggcgtggtcgacgcgcgcaagcagcgcctggacgtggtcggcaccttcgtggtggcctttgccaccgcctttggcggcggcaccgtgcgcgacgtgctgctggaccggcgcccgttctactgggtcgaccacgaaggctacgtgctgctgatcttcgtgatgtcgttcggcgcctcgttcgtgctgcgcgtggtcagccgcgtggcctcggaccgggccatgatcgtggccgacgcgatcgggctggggctgttctcggtgaccggcgcctcgctggcgctggtggcgcagatgacgcccaccgtggcggtgatgatgggcatcatctcggccgtgttcggcggcgtggtgcgggacgtgctgtgcaacgaggtgccgatgatcctgcgcgaccgctcgccctacgccacctgctcctttgtcggctgctggatctatgtcggcatgacctggctggcggtgcagcaggaagcggcgctgctgaccggggcagtggcgatcatcgccatgcggctggtgtcggtgcgctacgggtggaagctgcccagctgaaccgcacccaccaatgaaaacgccgccctgcaaggcggcgtttctctatcctggcccgaggctcagaccgcggcttcgtcctgctcgccggtgcggatgcggatcacacgctcgatctcggtgacgaagatcttgccgtcgccgatcttgccggtgtgggcggccttgacgatggcgtccagcacggtgtccagctggttctcggccaccaccacttcgatcttgatcttgggcaggaagtcgaccacgtactcggcgccacggtagagctcggtatgccctttctggcggccaaatcccttcacttcggtcaccgtcagaccggtcacgccgacgtcggccagggcttcacgcacctcgtcgagcttgaacggtttgatgatggcggtaatctgcttcatgactggcccctgtttatcgtttgttcacgcgcctggcggcgcatcgccgcggtcgcggcgctctccgggtggcattttaccagcccttggccgcttgcatttccgcctgccccacagccagcgcggccgcagcgttggctagcgcgcatccgggcaggccccggccctgtggataaacctgtggacagccactggagaaactgtgcacaagccgccacccaagagccggagctcgaccggcgctgcgctcagtccggcaccttctccaggtccgccaaccacaccaccgactctgaatcgctcggcgcgcgccagtcaccgcgcggcgacagcgatccgcccgagcccaccttgggcgcgttcgggatgcatgagcgcttgaactggctggtgcggaagaaacggtccaggaagatcgccaggttgcgcttgatctccggcagcccgtactgattgcgtaccacatgcgggccgttgggccagacgccgcgctcgcggtcgccccaggcatgcagcgccaggaaggcgatcttggacggcgtgaagccgaaacgcagcgtgtagtagaggttgaagtcctgcagctcatacgggccgatggtgctctcggtcttctgctcggggccgtggttgctgtcgcccgggaccagctcggggctgatgtcggtgtcgagcacggccagcagcacgtcggaaccgccctcgcccacctgcccggtctcggccacccagcgcaccaggtgcgagatcagcgtcttgggcacgctggcattgacgttgtagtgcgacatgtggtcgcccacgccataggtgcaccagcccagcgccagttcgctcaggtcgccggtgccgatcacgatggcgtggtggaaattggccagccggaacaggtggttggtacgctcgccggcctgcacgttctcgaaggtcacgtcgtagaccttctcgccggcggcgtatgggtggcccaggtccttcagcatggccaggcacgacggccggatatcgatctcggtcgcggtgcagcccaccacctgcatcagctggcgcgcctgcagcagcgtgcggtcgctggtggcgaagcccggcatggtgaaggccaggatattggcgcgcggcaggcccaggcggtccatcgccttggcgcagaccagcagcgcgtgggtggaatccagcccgcccgacacgccgatcaccaccttgctgatcttgctggccgacaggcgctgcaccagcgcctgcacctggatgttgtagacctccatgcagcgttcgtcgcgctggcgcggatcggccggcacgtacgggaagcgcgccacgttgcgcgccagcggcagcgacttttccagggtcaggtcgagcgggaagcgcaccacgcggaacttgtccacttctgccttgtgccggcgcaccgagtggccgaaggtgacctggtgcatgcgctcgcgcgacagccgctcgacgtcgatatcagcgcagagcaggtgcgaggtatcggcaaagcgctcggattcggccagcagctcgccgttctcgcagatcagcgcctggccgtcccaggccaggtcggtggaagactcgcccttgccggccgaggtgtacaggtaggccgccaggcatcgtgccgactgctgcgagaccagctggtgccggtacccggccttgccgaccacgatattcgaggccgacaggttgaccagcaccgtggccccggccagcgccgcgaacgacgacggcgggatcggcacccagacgtcttcgcagatttctgcgtggaagcggaagtcggggatgtcttcgacatcgaacagcagcccggcgccgaacggcacgtcctggcccagcagccggatcgactcgaccgcggcgttgtcggcggcgctgaactggcgcgcctcgtagaactcccagtagttcggcaggtaggacttgggcaccacgccctggatacgcccgcgcgcgaccaccacggcgcagttgaacaactggtgctcgacccgcagcggcatgccgacgatcagcgccgccggcagcttgcgcgaggcctcgacgatggtggccagcgccgcctcgcaggcgtccagcagcgcgcgctggtggaacaggtcgtcgcaggtgtaggcggagatgcccagctccgggaacgcaaccagcacggcgcccttctgggccgcctgcgccgccagggcaatggtctcggcggcgttgaaggccgggtcggccacccggcagacgggcacgcccaccgcgacacgcgcaaagccgtgggaatacaggttgaaaaacgggttcttcatatcgggccttggttatcgaaccatgcggaccatgccgccgcctgaagcatcccgggatgcctcggcaagcactggtgacgaggatgctccattttacgacgcccgcccctgccgtgcggcgcagcaacggcgcatcgtttccggtagactcgatcgatccacagacgggaactggtgcaatgcagtctgaatcatgcgtgcccggcgagggcaaggaccagcgccagccggcacggcacaagcgcaagtcggcaggcgaccctgcgcaggaataccgtaccgaaatcatctccgacctgggcgagatcgatgccgccgcctgggacgccctggtggcgcaccacgccgacgccacgccgttcctgaagcatgccttcctgcacgccctgcacaccagcggcagcgcctgcgccgagaccgggtggaacccgcgctacctgacgttgtgggcgccggccaaggacggccgcccggaacggctggccgcggccatgccgctttacgccaaggcgcattcctatggcgaatatgtcttcgactgggcctgggccgacgcctatgcccgcaacgggctcgagtactaccccaaatggctggcggcaattcccttcacgccggtgcgcggcgcgcggctgctggccgaagacgcccatgcgcgccgcctgctgctgcagatggcgctggcgctggccgccgaaagccagatgtcgtcgctgcacatcctgttccccgacgaggccgaggccgcgctgatgcagcaggccggcatgctgatgcggcacggcgtgcagttccactggaccaatgacggctatggcagctttgacgacttcctggccacgctgtcgcagaaaaagcgcaagaacatccgcgccgagcgccgccaggtcgcgcaggccggcatcggcttccggcgcctgcgtggcgcgcagatcgacgacgatgcgtggaagttcttcaaccggtgctatcgccagacttaccgcgagcaccattccacgccctacctgaacctggacttcttccggcgcatcggcgccgccatgccgcagcacctgctgctggtgatcgccgagcgcgagggccagcctatcgccagctcgctgctggtctatgacgatacgcccgaagtcagcacgctctacgggcgctactggggcgcactggagtaccacgcctgcctgcacttcgaaaccgcgtactaccagccgctggaattctgcatcgagcaaggcatacgcaccttcgaaggcggcgcccagggcgaacacaagatggcgcgcggcttcctgccggtggcgacgcgctcggcccactggctggcgcatcccgcttttgccgatgccgtcgagcgcttccttgagcgcgagcgccagggcatcgacgcctacctggacgaactgagcgaacgcaacccgttcgcccgcgcctgaacacgcaagccggcgctcagcgccacatccgccgcagcgtgttgtcgcccagcatgtagtggtggaacagcgacgccatcgcgtgcaggccgatcaccaggtagaaggcggtgcccagggtctcgtggacctccttgacggtgtccttcagcgccgggtcggccgccaccatcgccggcacttccagccccagcgaaggcaacgccagcaggtggccgccagcgttcatcgccagcagccccagcagcggctgggccaggatatacaagtaaagcacccagtgcatggcctcgccggccaactgcatccagcgcgcgcccggctccggcgcgggcgcgccgcgcaccaggcgccacaccaggcgcggcaccgccagcaccagcaccagcgcccccgcccattcatggactgtcatcgccagcgcgcgcggcggcgtgcccttggcaaaactgcccttcagctcgatcgcggaataggccagcgccaccagcaggaacaccgcccagtggaagcacaccgccagccggtcatagcggcgcagcggcgacaaggcctgcggcaatgcctggatttcggtgatgggattcataggggactcctcttgtcagcacccgcatagcgtagcgcaaggcacttgcccggatgctgccgtacatcaagcgcgcggcaacaaaaaaccccgccggagcggggcttcttcagcggcggttcagcttacttcttgtagttggccacgccgtcggtgatttccttgtgggcttcctcgatgccagcccagccttcgaccttgacccacttgccggcttccagtgccttgtagtgctcaaagaagtgcttgatctggtccagctggttctgcggcacgtccgacaggcccttcatgtaggcggtggccggcgacagcttgtccagcggcacagcgaccagcttggcgtccacgcccgactcgtcggtcatcttcagcatcccgagtgcacggcagcgcaccacggcgccggccaggatcgggaacggcgacagcaccagcacatccaccgggtcgccgtcgcccgacagcgtctgcgggatgtagccatagttggccggatagcgcatgcctgtgccgataaagcggtcgacgaacagcaggccggtttccttgtctgcctcgtacttcaccggatcgctctgggccgagatctcgatgatgacgttgaaatcgttggggatgtccttgcccggggttacgaggttgaagctcatgcggttctccagatgcctgcgcggtgttgttggatggcgggcattatagcggctcatgcctgaccgcaggctgacagctgggccaggcacggcgcattgcacgctggccagtgtcggcgataatggcgcattcttcagccgtcactgaaaagcgcagccgccgtgctgccccctgttgcacccgctgccccggagccacccatgcacgcccagcacttcgtcgccaaccgcctgatcgcgcccgacaacggcctgcgcatcaaggtcttcgatccgtccaacggcgagccgttcgccgagatcgcacgcggcaacgccaccgatatcaacgtcgccgtccatgcggcccgccaggccgccgaaggcgcctggggccagatggcgccagcggagcgggtgcgcctgctcaaccgcgtcgccgtggcgctgatcgcgcacgaggacgaactggccgcgctcgaggcccgcgacaccggcaagccgctgcgccaggcgcgcgccgatgcccgcgccgtggcccgctatttcgagttctacgccggcgcggtggacaagctgcacggccagaccatcccctacaaccccggctacaccgtgctgaccgtgcgcgagccgcacggcgtgaccggccacatcatcccgtggaactacccgctgcagatcttcgggcgcagcgtgggcgcggcgctggccaccggcaatgcctgcgtggtcaagccggccgaggacgcctgcctgtcgctgctgcgcgtggccgagatcgccgccgatgccggcctgcccgaaggcgcgctcaatatcatcaccggctacggccatgaagccggcgccgcgctggcgcgccacccgggcatcaaccatatctcgttcaccggctcgccccagaccggcaagcaggtggcccagctggccgccgagaaccacgtgccggtcacgctggagctgggcggcaagtcgccgcagatcgtctttgccgatgccgacctggatacgctggtgccggtggtggtcaacggcatcgtgcagaatgccggccagacctgctcggccggcagccgcctgctggtggagcggccggtctatgacgcgctgctcgaccggctggcgtcggtgttcgagtcgctgcgcgtaggcccgtccgagctggacctggaatgcgggccactgatcagccgcaagcagcagcagcgcgtgtgggactttgtctcggatgcgcagcacgccggcgtggccgtgatggcgcaaggccagatcgtggccgacgcgcccgaggccggctactaccaggtgccgatgctgttccgcgacgtgccgccggcgcaccggctggcgcaggaagaagtgttcggcccgctgctggcggcgatgccgttcgacaccgaggccgaagccatcgcactggccaacggcacgccctacgggctcgtggccggcgtctggacccgcgacggcgggcgccagctgcgcctggcgcacaagctgcgcgcgggccaggtctttatcaacaactacggtgccggcggcggcgttgaactgcccttcggcggcaccggccagtctggctacggccgcgagaagggcttcgaggccctgtacggattcaccaccctgaaaaccatcgccatccaacatgggtaacatcaatttcctgtccgtcgcctttgccatcttctttttctggatggcatggcatgtccggaacaagcgcgccaccaatccttccggcatgccgcggctgcaggtcttcaagcgcaagtggggcgacgtcgtcggcgaccgcgtgcactggtgcctgtatgtggcactgcccttcctgctggcactgatgatggttgccaatgccctgcgcgggcgggggccgttctcgcactaggcattgagtaccccgcagcacggaacaccagaacataaccacgacaccaggagacaagccatgagactggccaacaaggtagcgatcatcaccggcggcggttccgggttcggcgaaggcattgcccacacctttgcgcgcgaaggcgccaacgtggtggtcgccgacctgcgcgaggaagccgccgaacgcgtcgccgccgcgatccgcgacgccggcggccgggcccgcgcggtgcgcgccgacgtttcgcgcgaagccggcaccgaggccatgcgcgaagccgcgctggccaccttcggcgacgtccatatcgtggtcaacaacgccggcacgacccatcgcaacaagcccatcctcgaagtcaccgaagaggagttcgaccgcgtctacgccgtcaacgtcaagagcatctactggtcggcgcgcacctttatcccgcatttccgccagcgcggcggcggcgtgttcgtcaatattgcctccaccgccggcatccggccgcgcccgggcctggtctggtacaacggcagcaagggcgcggtgatcaccgccagcaaggccatggccgcggaactcggcaaggacaatatccgcgtcaactgcgtcaaccccgtgatcggcgccaccgccctgctcgaagaattcatgggcatgcccgatacgcccgagaaccgcgccagattccttgccaccatcccgatgggccgcatgtcgaccccgcaggacgtggccaacgcctgcctgtacctggcctcggacgaagctgcctttatcaccggcacctgcatcgaagtggacggcggccgctgcgtctgagccggtgccggccacctgccttccccgttagtcgtagctgtaaacgcatcatacagaagcgccatatcctcaggagacagcatgacaacaaccgcagtaaaccccggcatcagcgacgccgcctttgaagacgccacctaccgcaaggtcagttggcgcctggtgcccttcctcttgctgtgctacgtggtggcctacctggaccgcgtcaacgtgggctttgccaagctgcagatgctcaacgacctgcagttcagcgagaccatctatggcttgggcgccggcatcttctttatcggctacttcctgttcgaagtgcccagcaacgtgatcctgcacaaggtgggcgcgcgcatctggatcgcgcgcatcatgatcacctggggcgcgatctcggcggcgatgatgttcgtcaccacgccgaccatgttctacgtgctgcgcttcctgctgggcattgccgaggccggcttcttccccggcatcatcctgtacctgacctactggtacccggccaaccggcgcgggcgcaccaccacctacttcatgaccgcggtcgcgctggcaggcgtgatcggcgggccgctgtcgggctggatcatgcagtccttccacggccacaacggctggtccggctggcagtggatgttcctgctcgagggcattccgtcgatcctggtggggctgtgggtgctggcctacctggacgaccgcatcgcccacgccaagtggctgtcgccggaagagaaggcgctgctggagcgcaatatcgccagcgaggatgcgcacaaggaagacccgccgatccgcaccgtgatgtccagcccgcgcgtctggctgatgagcgcgatctacttctgcttcgtgatgggcctgtacggcgtcagcttctggctgccgaccatcatcaagcagaccggcgtcaagggcgcgctcgatatcggcctgctgaccgccatcccctatggctgcgcagtggtcggcatggtgctggtggcctacagcgcagaccgcagcggcgagcgccgctggcatatcgcgctgcccgcgctggccggttcgctgggcctgctgctgtcggtgcaatggcatagcgacaccacgctggcaatggtggcgctgacgctggccaccatcggcatcctgaccacgctgccgctgttctggagcctgccgacttccttcctggccggcactggcgcggccgcgggcatcgcgctgatcaactcgctgggcaaccttgcgggcttcctcagcccctatgcagtgggctggctcaaggacctgacccacagcaccgattcgggcatgtacctgctgaccgcctgcctggtggtgggcgcggcgctgacgctttcggtgcccaagcggctggtgagccggaaatagcccgtccgccaggatcagacgccgtcaacggcccttccctttgcgggcagggccgtttttcttcctgcacctgcgaagtcgctcacacgccgcctgcgggccacaatgcgccgtcggctgacgcggatgtaggaccaagcccggcagtgtcgcccacccttgggccctaggatggaaaagagagacccggagtgatcccacggggtcctccggggcatctgattccgaagctcgcccaaggaggccacgatgctgcacctgcccccgtttgcccctacccgttcgctggaacttgtcgaagcgcgcctggcacgccgctcgcgcgtcaagcgcctggtgatcgcgctcagcgccggcgtggtcgcactgctcgccctggtgccagcggccagccatgcgcaggcgccggtggtggaggccaaccctgcgcctgccgccccggcacccgctactccggccggcaccatggcgccgaccccgggtgccacgatgccggccgcgccgccggccgacaccatgccccctgccacacaacccgcgccgggcatagctgcgcctgccacggcagcaccgccgccgacggcatccccggcacccgcgcccaccggcacgccaccagccgcgccggcgccagcgccgatggcagcgcccgcgcagccacgcccgccgctgaccacgccgcccccgccgccgccgcgtgatgcgatggtccagcgtacggccggctcggtcgcctatatctgcggcggtgtcgccgaagacgagcaggtcgcgctgcaatcggaggcgcgcaagtacaacatgagcctgctgttcacgcagggcgcgcgcggcgagtacctgtccgacgtggacgtcaagctgatgcgcggcggcaaggaagtcgccagctttgtcgccgacggtccgcgctgcctggtgaaggcgccgtcgggcacgtacaacgtgcgggcgacttaccagggccggaccaagactgccacggtcagcaccggcggcaagaacgcgcagatgcgctggtagtcagctggaacggcgcgccgtgcggcgcgcccgtggaggaggaaaaaaggctcggcatcttgcgatgtcgagcctttttgtcttggaagtcattggcaggcttccgcacagcatccgcttaccgattgggtgctcccctctcccgcaagcgggagaggggagcaaaccgtcagtccgcctggccatcccccagcatctgccccaccgaccccgccgtaccggccgcccgttcacccagcaaccgatgcagcgtgcccagcagctcatcctcgttgtaaggcttgcccaggtacacgttgacgccgatctcctcggcatagcggcggtgcttgtcggccgtgcgcgaggtgatcatcaccagcggcatatgcgcggtgcgcgcgtcggagcgcacgttgcgggtcaggtcgaagccgtccatgtgcggcatctcgatgtcgaccagcatcgcgtccggcatgacatcctgcagttgcttgagcgcatccacaccgtcgcgcgccagcaccacctggtagccggcgcggctcagcaggcgctgggtggccttgcgcacggtcagcgagtcatccaccaccatcacggtcggctgcaccgccaggccgcgcaccggctcggtggtgccgtcgctcgccagttccgcaaccgcgcccatccgcgcctgcacggcaggcgtctgcggcaaggcctgcggcaccggctggccgcgttcgcgcaccaagcgctgcgccagcaccaccgggttgtagatcagcacgatctcgccatcgcccagcgtggtcgcgccggcaatgccttccaggcgtgccaggtgcgggccgatatgcttgaccaccacttcgcggttgccgaccacatcgtcaacatgcaccgccacgcgctcggcgccgctgcgcaccagcaccaccggcgaatacttgcgcccggccgcgaccgcgttgccttcctccagcagcgcgccgaagtagaagaacggcacctcggcgccggccacagtgaggcggccctggttgtaggcatccagcagtgccggggcgcgcagctgctggacttggtcgatcatgccgctgggaacggcatagcgccgcgcgcccagcgagatcaccagcacctgcgtgatcgccgtggtcagcggcaggtgcaccgtgaaggtggtgccctgcccgggcttagactccagcgtgatgcgtccgcccagcgccacggtctcggcgcgcaccacgtccatgcccacgccgcggccggccagctccgacaccgcgtcggcggtggagaagcccggcgcaaagatcagctcggtcaggcgcgcttcgctggcgtcgtcgtccggcgccagcaggcggcgctcgaccgcgcgcgcgcggatgcgctccaggtccagcccgccgccgtcatcgacgaaatgcagcaccacctcgttgccttcctgctgcacctccagcgtcagcgcaccagtggcggccttgcccgcggcgcggcgcggcgcggcggcctcgatgccgtgcaccaccgcgttgcggatcaggtgctcgatcgggccggccatgcggtccagcaccgagcggtcgatttccacggtgccgcccttgatcagcaggcgcacttccttgccggtctcggccgcggcctggcgtgccacgcggtagaggcgctcggccagcgcgtcgaactgcaccatgcgcgcctgcatcagcccgcgctgcaagccgcgcgtcaggcgcgcctgcgccgccaggtcgccggcggcgcggtcaaagccgcgctgcaggttctgctcgacggtggccacgtcgttgaccgactcggccatcatccgcgtcaactcctggaagcgcgtgaagcggtcgaactcaagcgggtcgaattcctgcttgtgctgcgcgtcggcaatgcgcgacgccatctgcgattcggcctggatctcgatttcacgcaactgcccgcgcaggcgcgcgacgttgtcattcagttcgcccaggtaggcgcgcatcgcctccagttcgctgtccaggcgcgcgcgcgtggcgccgacttcgccggcttcgttgatcagcgtgtcgagcgcgcgcgcctgcacgcgcaccagcgcgcgttgcggctcggcgggcacggccggcggcatcgccaccatcacgtctgccggccccggcatggcgggcaggctggcggcgggcaccgcctcgacgacggtatccgcctgcggcagcggcgcatcggcctgcgcttgctcgggcacctcggccaggccattgaccacgtccggatcgtccgcgggcagcaggcggccagtcggcagcgcctcgacatgcgccaggatgcggtcgtaccaggcatagagccgctcgaacagctttggcccgacggcctgctgcccctgcccgcgcaggctggcgtcgagcagcgtctccatttcatgcgcggcctggcccagcgccatggcacccgccatgcgcgcactgcccttgagcgtatgcagcgcgcgcagcaccaggccgccgtggcgcgagtcttccggggcggcttcccagccgcgcagcagcttgcccagctcgggcagcgtgccttgtgcctcttccaggaagatctggaccagcgcgggatccggcgcggcgccctcgtccgctaccggcgcagcgggcgcccggtgcggggtcggcagcgcgataaccaccgcgtcatgcggcactgccggcggctccggctggtcttcctgcgcgggcggcaactggcccagcagctgcgccaccgaaccgtccggctcggccggcgcctgcggcgcgggcaccgccacgcgcggacgcagcagcgcgcgctcgccaaactcaaccaggctgcggcgcaggccggcatcggcatccggccagacgcccgcggcaaactggtgcagcatgccgcgcaggcgctcgaccgcctgctccagcaggcggaaatcgcccgggtgcatcgccaccgggtgcgagcccagctgcagcagcagggcctccagcgcctcggcgatctcacgcacgggttccaggccgacggtggacgcactgccctggagcgtgtgggcaacgcgcagccccagctcgctcgggcacggatggccttcatgccgccattcggagatgtcggtggcgaactggcgcagcaggtcatcggcctcctgcaggtagacgttgtagagcgccaggccgatgcgcaccggcccgatcaccttgtagtggtcgtcctcgcccgacaggccgccggacaggcggaacgggatcacattgtcttcgccgtgcccgaccgcatcggcgccggtgtgaccggcggcgtcgacggccggcccgggcggcgcttccgcagccgcgccgggcagtactggcagttcatccgcggcctgcgcggcgcccgggtcgcgcaccgcttcggcggctgccaccagcggcgcgatgtcgtgccaggttgccgcatcgcgatgcagctgtgccgcccatgccgacaactcggcatgggcgcggcgcagcagcgccagcagcgcgggcaccggctcgcgcgcttcggcaatccacaggttcatgacctgctcgaccgcccacgccgcttcgccatagcgatgcaggccgaccatgcggctggagcccttgagcgtgtgaaaggcgcgccgcacgcggctgagggtatcggcatcgtgcagcgcctcaacgcccgagccgaggtcgccggcgatgccgcccaggacctcgtcggcttcgttcaggaagatgtcgagcagttcggcgtccagcgccgacttgtcgccgtcagccggcaggccttgcgccgcgggcggcgcggctgcgggtgccgcagcccgtgccggctcggccagtgccagtgccagcctgccggccgcatcatcgctgccggccagccaggcattgcattgcatggtggcttcggcggcctggcggcgcagcgcggcatcgtcatcgatggtggcctggtcggccagcgcctgcagcgcggcacgcaggcgctgcactggcggcgcatcgggaacggggccagcctggatcgcctcggccgcggcggcgcgcgcggcggccagcggatgctgcgcagcgcgcggcgcatcgggctcgccggcctcggcaagcgtatcggcccgacgcacgcggccgaattccagcgcatcggcaaaggcatggaccgcgcccagctcggctgcgacctcgcccagcagcgcggcgcgcgcactggcatcagcgagttcgcccgaaacggccagccgcgcattgacggactgcaccgcggcggcggcctgcgcggcatcgtccaccagcgctgcaggcagcgcggcggacgactgcaattgcgccagcgtggcgccaagcgcggcgaaggcctggcaggcatcgcgcaagtggcctgcgccttcggcgcgggccgcgttgcggtcgaagctgtccagccacgattcaccgctgtccagctgcgcccgcagctgcgtcacggcctcgctgcgcagcgcctgggcgcgcgcctcgtcgaccatgcccgcaagccacgcgggcgcgctcgcggcgggatcggccaggcatgtcgccagcgcctcgcactgcgcggcaaaacgcgccgccgccggatgggcggattgcccgtgcacgcgccacggcagcgccagcgcgcgcgccaggaacaacgcgatgccggcggcgcccagcgcctcgccgcggtggtgctgcccgccgtgcatggccgcctgcgccaggcagcgctgcagcgccggctgcccgagcggctgcgcggcttcggccagcgcggccagcgcggtttcccagccggccggctcgcccgcggcggcgtgctcgagcccagcggcggcctgctgcaggttgcgcgtgtcgatcgggtcgagccagccgtaatagcgctggcggaagtccgcattggcaagcgcgtgcgcggggtcgaggcggaatgccgcgagcgtgcgcgcaatatcggcacgcaacgcggcacgcggctcagccacgccatcgtcgtcaccggccccgtcgcgggccaggccggtgcagaccagcaggaacaccgcgtcgttgagcagcgcctgcggcacgcgcacatggccctgcaggtactggcgcagcagcaggttggcgcggccggcaaagcgcttggccagcaggtcggaaggcaacaggccaaggcccagcgcgcggaacaccagccccagcacatgccagaccccgcgatccggatgatccgccgcgcggcgcgcctcctgctcattggcgcgcacctcgtccagcgcagcgcacagcggcagccaggcttcgcgcagcagcgccgcgtcggtgcacggcgcaggcaggcgcaatgccttgagcaaggccgattcaaactgctggcgcgcacgcatgaccggcgccgggcccttcgccggcagcagcatgccgggcagcatctgcagctcatcgagccacaggtcggccggatgcacgcgctcttcgcccaggcgcgccagcacgcccgcgtagggctggaacaggcgcagcggcgcttcatcgtcaccggccatcaggtcgtcgacatactcggccaatgcctgcacgccggcgcggaataccgccagcgcctcggggccggcggcaacggtgccggcgtcgatggcttcgagcaggcggcgcagggcctggcaatacggatcggtgccgtgcagcccgacgatatgcaccgcgccggcggcctggtgcaggtgctggccggccagccgcagcgaggtggtgtcgcgcgcgcccagcgcttcgggcgcctggcggacctcgtcgacatagtggccaagctcggcggcggcgtcttcgagcgcgctgcgcaggctgggcgcaagccacgccagcccggacaggtcgcgcgcgggggcgcctgggtcggaaacagcaggtgcgctggcggatggcggcgccggagccggctcgggcacggcgctggcttcagccggtgcgccggctgcggcgccatcgcgcgggacagggaaattcagggacatgacggcttccagtgcggcgcccggagggcggccgcgggcaacctgccgcaacaggcggcaggcgcggagttggcatggagcgcgtggccgctaagcctggtaaggccgcggtgcgcggaagcggtcgcaggcgtcatccggccactcaggcgatcttgaatcgcgacacggagttgcgcagctcttcggtcagcagcgtcagctggcgcaccgactgcgcagtctggcgcgtgccggtggtggtctgctcggtgacctgcaggatgcgttcgatatggcgggccacggtggtggccaggtcggcctcgtgcgaggtggactgcgagatctgctcgatcagctcggccagctggcgcgacacgcgcccgatctcgaccagtgcggcgccggcgttgtccgacagccgcgccccttcgaccacgccctgcgtgctgcgctccatggcgtgcaccgcgtcctgggtatcggtctggatggtgcggatcagcgcgccgatctgcttggtggcctcgccggagcgttcggccagccgctgcacttcttcggccaccaccgagaagccgcgcccggcctcgcccgcggacgcggcctgaatggcggcgttcagtgccagcacgttggtctgctcggtaatgtccgagatcagctcgacgatttcaccgatctcctgcgacgactcgcccaggcgcttgatgcgcttggaggtttcctggatctgctcgcggatgtcgttcatgccggtgatggcgttctgcaccgcctgctggccctgctccgcggcagacagcgaggcacgcgccacgttggcggactcggccgcgccgcgcgacacctgcgtgatgcggtcggccatctccaccaccgattcgccggtctggcggatctggcgcgactgctcttcggtggtcgacaccagctgggtcgaggtggactgcacctgccccgaggcctgcgtcacctcgccggcggtctgctgcacccggccgaccagctcgcgcagttcttccacggtgtaattgaccgagtcggcaatggcgccggtgatgtcctcggtcaccgtggcctggcgcgtcaggtcgccgtcggcgatgtcctgcagttcgttcatcagctgcagaatcgccttctgggtattgtcgttgttgcgcttttcgtccagccggcgggactcggcctcgcgctcgcgcgcctcggcttccagcgcgcgcacgcgtgagtcgcgcaggtacagcgccgccaggcctaccaggcacagcagcgtcatggccgccgacaccacggtcgcgcccagcgtcaccgggcgcacgcgcgccgattgcgcgtaggcgcgctgcagcgccgagagttcgccgcgcagcgcctcgttgtcgttgaagatctgctgctgcgcgcgcttggcggcaatcaggccgggcaggttctgcaggattgtctgcgtggtcttctgcaccgcttcaaagcgctgcgacagctgcttcaggtagccgcgcgtttcttcgtcggcggccgccgacaggcgcagcgcctcgctgccgttgagcaggccgtccagcgattcgcggaaggtgttggtgtccttgcccagcaggaacgcggtttcggggttgacgccttcgccggccaggaactcgttcaggttcttgcccaggcgctgcgtcagcatcaccagctgcgccgacgccgccacctcgcgcgcgttggcgccggactgcagcttgattgccgcgacctgttcggcggattccagcagctcggggttggaagcattgaagatctgcagcgtctggccaatggtgttcagcaccggctgctgcgccagcacgtcggcggcgcttttctcggagcgcttccacgattgcatcgcggtctcgagcagcggttcggccgcgccggtggtggcgcgcacgcgcttctcgtcgctgccttcctgcagcgccttcaggtcgcccgccagcgcgtctttcgactggcgcagctgcgtgaaggcctgcgcattgcccagcagcgccaccggcaccgccttgcccaggcgctgcgagtgcatcagcatgtcgccggcgatctcgatctgcgcggcggcgttgttggcgatgcggttgtccaggtacaccgagcccagcagcgccaccagcgacaccaccacgcccaccgtcagcagccgctgctgcgacgagaacggcatgcgcccaagccagcgcgtgacatgctccattggcgtggcgcccaggccgtcggcggatgggggtgccggtgcgggttccgggccgccggcataggccatgccgggcccgcccgccaggccggtggctgcttcggctgccggcgtgcgccggcccaggctgaatttcttgaaacccatggcaccctcttccatttaatcgttgtcatgcccggcggctcgtgccgggtgcggcaggcagtggcctgcgcgtcattcttgtttcttgttattggcggcgcggtggcgggcctcaggcctcaggccgtaacccgtcccacctgcaggaaggccggcgcgtccagcagcgcgcgcacgtccagcacctgccagtcacgcccgtcgcggtcggcaaagcgttgcccttcccatgccggcgtgccggccggcggcggcgccgcatcgccgtgcggcaggctcaggtcggcggcatggcgcaaacccgccacgcgcgtggccaggatcgcgcaggcgcgctccacctggcgcgacagcaccacgatcttgctgccgggctgcagtggcgttggcgcgccgccgcagaacaggctgaaatcaatcacgcctagcaggctgccgcgcgcattgaccaggccgctgtaccacggctgcgtcagcggcaccgggctgggcgggcgcatgtcgagcacttcgccggtatcggccagcggcagcagccagttgcgcgcgcccacctgcagcgccaggtagctgtcggccgcgggcaggctgcgcgcctcgcgcaggcgccgggccagcatggcctggtagtcctgcaggcgagtctggcgggcgcggaggtcttggcgtggcgcgttcatctggcggtccccggaacaggtggcagtggcttcccgtacggcctgcgctggcagctcagtgcgccagcgcggcaatcttgcccagcagctcttcgccgtcgacgggcttgacgatgtagtccgacgcgccctggcgcatgccccagatgcggtcggtgtccaggcccttgctggtgcacatgatcaccgggatgtccttgaagcggtcgtcgcgcttgatcgcgcgggtggcctggtagccgttctggccaggcatcaccacgtccatcaggatcaggtcgaagctctcggcctgcaggcgcgcgaaggcctggtcgctgttgctggcaaccgagaccttgaagccgcgcttgccgagcaggtcggacatgaacagggcttcggtgggggagtcgtcgacgatcaggatcttgttgatggcagtcatgaggttttccttcgattcgtacatggcgtcgcgtgcatgcgcgtcaggcaggcagcacgtggcccgcggcctggcatggcaggcaggcctgcacggcgtgcagcagcgcttcgcgggtaaaaggcttggcaagatggtcgtgcgcgccgaccaggcggccgcgcgagcggtcgaacacgccgtcgcgcgaggacagcatgatcacggggatggcgtgaaagcgcggactcttcttgatcagggagcaggtctggtacccgtccaggcggggcatcaggatgtcgcaaaagaccaggtccgggtgcagctcgcccaccttggcgagcgcctcgaagccgtcttcggccagcaccacctggtatcccgcctgcgacaggaagatctccgcggtgcggcggatggtgctggaatcatcgatgaccagcaccttgcggcgcggctgcgccgtggtgtccggaatggaaacgccaggcgccagaccctgggcgccggcggtattgacccgctggttttcttctgtttgagcgacccgcattgttgttcccgcgaccagctgccccttgcggagcgccggcaagcactagagaacacccgcgcggagcagcgcgacccatgcgcgccccgacggacccccgacaattcttgtttcccttccaaggccgggctgtgcccggcagtggcggtgcgtggaacccgcacctgcctaccgtcctccccaccagcggcagagggacgggcagtcattttgcaacagagtgtgacaagacgccggggggccgtcaatcggggccggccgcggccagccagcgttttgtcgcatcggcgcgacgcgcgcccggttattgttgttctggggacgtcgcctcagatggcgaccatctcgaaatcttccttgcgcgcaccgcattccgggcaggtccagttgatcggcacgtcttcccaccgggttccgggggcgatgccgtcttccggcgcgcctgcggcttcatcgtagatccagccgcagatcaggcacatccaagtcttgtattccataacaggctctggccactctccattaaaatccagcgcagatggtaccgaaaccgtgccgccggcgccagccggcggccgccagaatcgtgccagatccgccgtgttcgcgcatgttagcgccctgttagcgcctgattggccggtaattgcagcgaatttccgctgtttttgccgcatgtcaacgataagtcccgggccgccgcacacgatcccagcagtccttgtcctcacctcaacgccatgtcccgtaatcagcagctcttcgaccgcgcccaacagaccattcccgggggcgtcaactcgcccgtgcgcgccttccgctcggtgggcggcacgccgcgcttcatcacgcgtgccgaaggcgcctatatgtgggacgccgacgggcagcgctatatcgactacatcggctcctggggcccgatgatcgtgggccacgcccaccccgaagtggtgcgtgcggtacaggaaaccgctgcgcacagcttctcgttcggcgccccgaccgaggccgagatcaccatggccgaggaaatctgcaagctggtgccgtcgatcgagcaggtgcggctggtctcctccggcaccgaagccaccatgagcgcactgcggctggcgcgcggcttcaccgggcgcgacctgatcatcaagttcgaaggctgctaccacggccacgccgacagcctgctggtcaaggccggctccggcctgctgacctttgccgacaccacccagaacgcgccgtcgtcggccggcgtaccggccgacgtaacgcgccacaccatggtgctggagtacaacaacgtcgagcagctggaacaggccttcgccaggcatgccggcgagatcgccgcggtgatcgtcgagccggtggccggcaacatgaacctggtgcgcgccagcgatgccttcctgaaggccatgcgcgagctttgcacccgcgacggcgcagtgctgatcctggacgaggtcatgaccggcttccgcgtggcgctgggcggcgcgcaggcgcactacggcatccggcccgacctgacctgcctgggcaaggtgatcggcggcggcatgccggcggcggccttcggcgggcgccgcgacatcatggccaggctggcgccgctgggcggcgtctaccaggccggcacgctgtcgggcaacccgctggcggtggccgcgggcctggccacgctcaagctgatccaggctcccggcttctatgaccgcctggccagccagacccgcaagctggccgacggcctggccgaggccgccaaggctgcgggcgtaccgttcgcggcggacgccatcggcggcatgttcgggatctacttccgcgagggcgtgccgggcagcttcgccgaagtgaccaggagcgacaccgcgcgcttcaaccgcttcttccacgccatgctggatcacggcgtctacctggcgccgtcggccttcgaggccggctttgtctcggcgcagcatgacgacgccatcctggcggccacgctcgaggccgcgcgcaaggcgttcgcggcgggctgaggccttgccaggcaggcggcgcaccagtgcgccgcctgcacctctggcgacaagggcggtgcgctacacttgggttttcgtccaacccgcggagtctccgatgcgcgcttcttcgtccccctccttgcccggcagctcgccgatgccggtcttgcgctggctgctgctggcggtcatggccagcctgctgtccgcctgcggctacaacgacttccaggccaaggacgaggcggtcaaggcagcctggggcgaagtcatcaaccagtaccagcgccgcgccgacctgatcccgaacctggtcaacacggtcaagggctacgccacgcacgagcgtgagaccctcgaggccgtgaccaaggcgcgcgccgccgccaccagcatccaggtctcgcccgagaccctgaacgaccccgaagccttcaagcgcttccagcaggcccagggcgagctgtccagcgcgctgtcgcgcctgctggcggtgtccgagaactacccgcaactgaaggccgacgcctcgttccgcgacctgcaatcgcagctcgagggcaccgagaaccgcatcaccgtggcccgccagcgctatatcgccgccgtgcagcagtacaacgtgctggcgcgcagcttcccgaccaacctgacggcgatgatcttcaagtacccggtcaagccgtcgttcacggtggacaacgagaaagccatctccacgccgcccgcagtcaaattctgaggcgggccactccatgggccacaccccgcgctcgccctggcggcacgcctggctggcggccgccctgctctggctggcggcattgctggccggcccggcgctggcggcagacggcttcgtcgcggtgccgccgctgacccagcgcgtgactgatctgaccggcacgctgacgccgcagcagcgcggcgcgctcgagaacgtgctggcggaatacgagcagcagcgcggtagccagatcttcgtgctgatggtgcccaccaccgatccagagccgatcgatgcctacagcatccgcgtggccgacgcctggcgcgccgggcgcaagggcatcgacgacggcgtgatcgtgctgatcgccaaggacaacccgcccgggctgcgcaagatgcggctggaggtcgggcgcggcgtgcaagggtctctgaccgatgccatgtccaggcgcatcctgcaggacgtgatggccccgcacttccgccagaacgacttctacggcgggctggcggcggggatctcggcgatccaggccaccatcgacaaggaaggcctggcggcaccgcagcgcaaggcgcagcaatcgtccgcgctggccgagtggctgccggcactgctgccgctggcgatcatcgtgttcttcttcctcagtgccatcctgcgccggcgcgggccgcagatcgtcaccacccggcgcgggcgcgacgtgatcgccggcggcctcggcggactgggcggctacaccatggggcaggactggcgccgccgcggcggctggggtggtggcggaggatttggcgggggcggtgacagcggcggcggttttggtggcgggggcggcggcggcttcgacggcggcggcgcctcgggcaactggtgacagcacaaggaacgaagacaatgccgaatctccgacgtgccctgcaccatatcgccaccacggccagcgcagcccgcaagcactttccagccgaagcccagcagcagctgcatgcagccgtgcatgccggcgaagccagccaccgcggcgagatccgcgtggtgatcgaagccagcctgccggtgggcgatgcctggtccggcgtcacgccgcgcgagcgcgcccgcttcctgtttggcgcgctcgaggtctggaacaccgcggaccataccggcgtgctgctctatatcaacctggccgaccatgcggtcgagctgctcgccgaccgcggcatcgacgccagcgtggggcccgccacctggcgcgagctgtgcgacgaactggtgctgggactcagacaggacctgtcggtacggccggtgctggccaccgtggcgagcatccatgcactgctggccacgcacttcccctccgacggcgggcacaacccgaacgagctggacgaccgtccggtctttctctagccgaccggctcagcgggcggcagccgcctcgcggcgggcgcgccgcccgcccatcgcgtaccacaccgccgccagcgcctgcagcgccaccagcacggcccacgccgtcaggtgcgcctccttcgggtaatggccaccaataacgggccacaggtccagtacgaagccgatacccacctggcaggcaaaggtcgacaggaacacggtcagcgtcagcgccgtggtagcccttccgatcagcgcatccgggaagctgcgcgccagcaccgcataggtcaggatgccgctggagccgaacacgccataagccacccacagcagcaccggcggcagcgggacctgcgccatcagcagcagctggaccatgataaaggcggtcatgccagtgccggcaaaggcatacaggcttacgccgatacgctccaggtggcgcgcggcccagcccgcgccgacgcagccggccatcatcgcgaagccgatcaccgagaccagttgtgcgctgctggctggatcgaagccgggcacgtcgcgcaggaacgcacccacccatagcgtctgcaccgccatgaacacgccctggttgagcagtgtcagcggcaccacgcgccagaaacgttcgctgaccaggatctggcgcgtgccgcgcagttgttcgcgcaggctttccttgccggcgcgcggcttgtccggcacgccgaaccacagcagcaccgccatcgccagcgatatgcaggtcagccccatgctgaccgtgcgccagtcagtcaatgacagcagccacgacagcggcgcgccgaccagcaccgcgcccaggccgccgatggccatcaccacaccgttgagcaagggcatgcgcgacagcgggaaccacatcgacagcgcctggatggtggcgcccaggcacaccgacacgcctaccccgatcagcagccggccggcggccagcccgcccatgccgggcgccagcgcgaacaccatcgaaccggccaccgccaccagcagcatcacggcctcggtgcggcgcgggccgtagcggtccagcaggattcccgcaggcaactgggcgcaggcgaagccgaggaagtagaagctggtgagcaggcccaggtcgccggcattgagcccgagctcgcgcgtcaggttcggcgcaaagcccaggttgacgccgcggaacagataggacaccaggaagcccagcgagaataccgccagcacgcgccagcgggcgccggcagcagcaccaggggcaaatcgcgcttgcgagggcgcggaagacaagtttgaagtcgtagtcgtcatgatggcccgaattgtcgttcctccggcaaaccaaagccaacgaaagatacccgcggcaattgtgagtagaatttgacggccatggccaaatcccccgccaaacccgcccaacgccccgtccacctgccgccgctgcaagcgctgcgtgcgctcgaggccgccacgcgccaccgcagcttctcgcgcgcggccgaggaactggccctgacgcacagcgccatcagccaccatatccgcgcgctcgagaccagcctgggcaccaagctgttccagcgcaccggcagccagatgacccccaccagcgtgggcgcgcggctggcggaacaggtgcgcggcgcgctcgacagtatcgaaagcgcgctgcgcgaggccggcaacagcgccgcgccgccggtaacacggctgcaggtcagcgtgatggccgatctggccaatgcctggctgatccggcgcctgcccagcctgcacgcccaggtgccgtcgctggacctgcacctgcggctgcatgcggagatcacgccgcccgacccgtacagcgtcgatgtcggcatctggcaccagcgcatcgacctgcccggttttgaatgccacaacctgatcgaggaccatgtgatcgcggtggccagcccggcgctgctggcgcgctaccccggcttcacgctggccgacgtgccgcgcatgccgatgctgcgctttgcgttgcgcccgtggcgcgactggctcgaagccgccggcctgccaggcgacgagcccgaacgcggcccgatcttccaggatgccggcctgatgctgcaatcggccgtcgccgggctcggcgtagccactgcgcgcgcccagctggcgcacgattacctggccagcggcgaactggtgcagatcgggcccacccgcatcccgtccagcctccattactgggtcacctggcgcgaaggcaatccgcgcgagaaggccatccagcagttccatgcctggctggaggaacaggtccggcaggaagccggccacgtccaccctggcgccgacggcagcacgcccgccaagcggtttcatgcatgaaattgtttgaggcgcagatgttggcaatacgaatcattttcgtctagaccagtgaaatcaagggcttggcgggtgccgcaagccctgcgatggcctgccgtacgcggtgccgcggcgttgccagagcggtccgagtttcaccaatgcaaccagatcgcacaccgtgccagcgtccgtgaaaaatctacccgccccatccaaagagatgagatacggccgggcccgcccggcgccgcatcgtgcaaacgcttgtcaacgcgtcgattccgtccacccaaccgcgcccgcaaccgcgtgcgcggcgccaaaaggctgaagacaaccgcggcacgccggggtggctaccgaggtacagagttcaaaacgttgtaacggaaatgaaactacctggcagcttcattcgcgtgctgcattcgagccctgacacctgtccgtttgaaattttgctctccctccttcggatgggcattgccggtgaaaagtaggcttgtcgacactcgcttgccacgcactgtgatccatgcgcctaattacccgctcgccgaatgctgcgctgcaatatagaaatcccgccagatgtatcagaagcggaacgttattgatcgccagcaattgcccaaggccagccgaaaatttccttttccttttgttatcaaaggattagccatatctggcacgttcgtcgcacatatgtccgcgcgaacagaagcccggaacagggggacgtctgaaaccgaagcggcaacacactggcacgggttcgccgaagatcagtttcaggacgaccccgcatcccagggcgggattcggactggcgctgtaagcgtgggccacgcggcaggaactggtccgcatcggctggccaggtgcaggggtcgtcgacaagattagcggaggtcgttcaggaacacgggccgcaagcggacgaaaagcggcccgtggtacctggactatgcggcacgccacggctgaccggggcggcacgcagacaacaagcggacgcatcggccgagccggcgcatccggacaagaaacggggtgaagcaacagcctgccatgcaggcgatgcgaagcggcagccgccgcgaccgatgccagggaggcgaggtcgcggcggcggcgaaaacgggcccaccggcccgcgcaacgcagcgccgcgggcagcaattttgggagagcgccaggccgtggcattgacatgttgcggcaggcgcaagccttagagccaacgaaaccagtgacccgcaacagcaggccaccggctttgtaaaagcaaaagatccggggaaatttatgagcgcgtacaccaaccgcccgctgctgtacctgtcgcagcaccacgacgccatgctctgcaggatgctcgcacagcgtggctggaagatcagcttcgcctccaacctgcaagacctccacgcgctacccccgggcaaccagccgcttgcggcgatgctcgacctgcaaggcggcttcagcgatgccgacctggaatcgttcgagccctggctctcgctgccgcatatcggctggatcggcatcatcgccggccaggagtccctgaccgaatccgcgcgccggctgctgggcctgtacttcgtcgactattacaccgcaccggtccagcaccctcgcctggcggaatcgctcggccacgcgctcggcatggcgcaactgcgcccgggcgcgcagcatgcccgccccggcaccgcacgcccggacggcatgatcggcagctgcccggccatgcaatcgctcttccgcggtatcgagaaggtgtcgcgctgggacacacccgtgctgatctccggcgagtccggcaccggcaaggaactggccgctcatgccatccaccgcgcttcggagcgggcctcgcgccccttcgtcgcggtcaactgcgcggcgatcccgcccacgctgctgatgtcagagctgttcggctatgagcgcggcgccttcaccggcgcgaccaagcgcaagcccggccgcatcgagatggcacagggcggcaccctgttcctggatgaaatcggcgacatgccgatcgaaagccagaccagcctgctgcgcttcctggaaaccggccgcatcgagcggctgggcggcacggaatcggtggaggtcgatgtgcgcatcatctccgccacccatgtcgacctggaagccgcgatcgccgccgaacgcttccgcggcgacctctaccaccggctgtgcgtgctgcgcgtgcgccagccaccgctgcgcgaacgcggcagcgacatcctgctgatcgccgaacacgtgctggacaacgtgcgcaagcagtcgccggcacgcatccgcggcttctcgccgatggcgctgcgcgcgatccagcagcacaactggcccggcaacgtgcgcgagctgatcaaccgcatccgccacgccgccgccatgtgcgaagacggcgtgatccagcccgacgacctggagctggccacccccgccgacgaccgcccgctcacgctcgcggccatccgcgaagcggccgagcagaccgcgatcgtcgaggcgctgcagcggcatcatgaacggctgattgacgtggcggcagagctggggatttcgcgggtgacgctgttcaggttgatgcgggattacaagctgcaggtgaagaagggggacctggggttgatctgcgtgcagggctagccgatccatcgcggaggaagcgaccgatgtcacctgatgcctaccttgaaatggccgagaccgaagccagccactggtggttccgggggcggcgcgaaatcgtcggcacgatcctttccagcctggcgttgccgcgcgacgcgtcgatcctggagatcggcgcgggcaccggcggaaaccttgagatgctgtcacggttcggcaacgtcagcgccgtggaaatggatggcaccgccctgcggctggcgcgggagaagaccctgggagcctgcgacatccgcagtggcaggtgccccgacgacatgccattccccgaacacagcttcgacctggtctgcctgcttgattgcctggaacacatcgccgacgatgccggggcactggactgcaccgcaaggatgctgaaagccggcggcgctgcactcattaccgtgcccgcctatcaatggctatggagttcccacgacgtcttcctgcatcaccagcgccgctatggcaagcggtcgctgcatgcactcgccacccggtgcggcatgcgcgtggaacggatgtcctatttcaacacgctgctgttcccgcttgcggtggcggcccgcatcagcgaccggctgagcggcagccggaaggcaacgggagcgggtctcccgccccaacccgtcaaccaggcattgcaccgcctgttcagcacggaacgccattggctggcacgcggatcgctgccgttcggcatttccctgatggctgtcgtgcgcgcatcgtgagcgccagcatcaccacgcccgaacttcgccgggtcacgcgcttcctggtatcgggcgccacctcgacgggcgtgcatgtcgccatcaccgcgacgctggtcaccaccctggcgacctcaccggtcgcggcgaactgcgtggccttcgtgtgcgcgaccgcctgctcctatcttctcaacaccttgtggagcttctcgtcgcggctgcgcaaccggaccctgggccgctttgccggcgtatcgctgcttgggctgggcctgaccatgggcatttcctggacggcgcaatatctgggggccagctattgggctggtttggccggcgtggtcctgacggtgccggccttcagctaccttgcgcaccgggcctggacttatcgggactaggcatcgtcccgcggccaggccgggcacgcatcagcggccactgctcacatgcccgcggtcgatccggatcacacgccttcccgaggcgatgagcctgtcctggccggtttcctggtaacggcgccgcaccagatagatcggccgtcccttggcttcatcatagatgcggccgacgtactcgccgaccacgcccaacccgatcagctggatgcctcccaggaacagcagtaccgaaagcagcgacgcatagccagggacatcaataccgaggatcagggtacgtgccacgatgaaggtgccgtagcagaacgcgccaagcgcaatcaggactccgatgtatgtccagctgcgcagcgggatggtgctgaagctggtaatgccttcaagcgcgaggttccacagacgccagcccgaaaacttggaacgcccggcgctgcgcgactcgcgctcatagggcacgatcacggtccggtagcccacccaggcaaacagtcccttcatgaagcgccgccgttccggcatctgcttgagcgcgttgatcacgacccggtccatcaggcggaagtccccgacgttcacgggaagcttctgctcggacagcttgttatggatgcggtagtaggcgcccgcggtcacgcgcttgagccaggagtcgcacacgcggctgctgcgctgggcaagcaccacctctgccccttcccgccagcgcatgaccagctcagggatcagtgagggcgggtcctgcaaatcagcgtccatgggaatcaccgcgtcgccaagggcttcgtcgagtcccgcagtcaaggcagcttccttgccaaaattccgcgtcaggtccacgactcgcacccgtgcatcccggcgcgaatatgcaatgagcttgtccagcgtgtcgtccgagctgccgtcgtttaccagcacgatctcgaagcggatcgcatcgatggattcgagcactggaatgacgctggcgaagaatttgctgatgctttcggattcgttgtagcagggcacaacgagggaaagcagtttgacatcgtatggacccgacatgatcccctcccgagacggggtggcttgtgcacacacaccgtcgtgattgcgctgtcatgcgccttgttatttacctggtgcgaaccgctccccggcccgcgccctgcgcaggattgccatcagcagcaacagcgtcaccagcggcccggcaggtggcagatgacccgcctgattcatgctcagggcaaacggcagcagccatgccaccaccagcagttcccgctcccctttcatccagccgtgcttcacaccctcgactgccaggcctgcgatcgccagtcccacccaggtcagttcgtagtaccagaggtaggggcttaccatcacggtggacgcggccagcgcggcaatacgcagtgccgtcgaactccggccgcgccaggctctgaccagcacccagatcgcaaacaccgcgcccagcccatgggccaggtacgcgaccgtcaccgacgccccggcccggcgcatcatggcgaagacggtcggacaatggcgccatccaatctcgccctgctcaagtacgatctgcctgaagagcgtgccgctttccaggaacgcgggtacggtttcccatccccaaagggcaatgctgcaggcagcgatcgcagccgcggttgccgcagcggtaaagaatgccttccatgcgcggtccaccaccaatgctacggggagcaacgccgccagttgcggcttcacgctcagcaagccaatcagcacgcccgccagcaccggccgggttctcaactggatcagcgcccatgccgccatgccggccgtcagtaacgagttctgcccgatcaaggcggcctcatggattccgggaaaagccagcacgggcagccacaccacgtggcgcggcacaccgggaaaagccaggatcctgagtaccgcggtgatgtacacgactgccgtgctgccgatgaaaagcagatagctcgctgcaaacggcaacaaggacagcggcatcacgaacagcaggaaggtcggcgggtagacccatggcaggaaaaacttcccctcgccccggactgcaccgaacgccgctatgacgtgccgcagcgtctcgtagtcatagaccttggcagcctgacccttcatgaccagatacgacgcactccagaaggccgagaaatccacgccagggcgacccagcgaatccgtggtgaagcccctcgttttgaatgcccatgccacgatcaaggcaccatagatgatcagcacggcaacgctgtaggcccggagacgctccaggtccagccaatgccgcgacatcactgaccccggcgttgctgccgggctatggtccaggctcatcgctccccatccccctgatattctgtggcagcgccggcctgatttcttcttggcaatgcagcggcgatgcatcgatgtactggctccattctggtcaggcgcccaccgatgtacaagcagaaccaaggcctgcgcgggggcgctgaaatccggctcgtgcgagcgtttccaaactgaatcgcgacccgcttcgaccgcaatcccgtgtgccattccggttctcccgacattgaccgggggcgcagccagtccgcggcgacagcgcgcgtttccccgctgaaacgttcgcgttcgggcggcttactcccggcgactcatcccgcgcggacgcacagcggcgccattgcgcgtcggtctccgccaaatgcactgtgtgccgcacgctccgactcatacttttggagcagggatggccgcacgcgcgcgctgcctcgcatgcggccgcgagcttcaaagaattaagcacgattcgtcgtggaaacgggagcacgggcacgttgtcgccatctcggcaacgcgctcacccaggcggcgccctctccccgggaaaacaagcgcacctgcggcgatggcgcggttattgcgacagcctggcaactgcgcccccggcggcgccgggccagccgcgcgcccttcccgcctgatccggatgggtaaccattacagccaccgcgagacgccatgaaaatcatcacgacctgggtggagacgaccagcagggaaagcctgctccagcagttcgccacgaagcaatggttctggctcgccctcttcggactcagcctgttctcgatcctctcatttatcggtggccgcttgctagtggatgccgacaccctctggcacatcgccgccggcaaatggatccttgccaaccacgcagtgccggcgaccgatccgttctcattctcttttcacggcgcaaaatgggttccgcatgaatggctggccgaagtcatccttggcgcatcccatgcctggctcggctgggccgggccggtgctggtcaccgcgctggcgactgccgtcacgctgaccgtactgttgcggttcctgctgcgctatatcgaaccactgcatgcgttcgccgtgacactcctggccttcctcacgctggcccagcatctgctcgcccgcccccatgcgctggcctggccgctgatggtgatctgggccgcccaccttgtgctggcgcgtgagcaaggcaagcgacccagcctgtggctgccggtcgtcatgctggcctgggccaacctgcatggcagcttccttctcggtatcgggctggccggcgcgctggccgtcgaggccttcctgactgaaggacatccacgccggagcgcgcgggcatgggcaccattcctggcactgaccgtcctggcggccctgctgacaccgaacggcgtggacggcctgctcttccccttccacgtttccggcatgagtttttcgctcagcatcatcagcgaatggaagtcaccggatttccgcttgatccagccaatcgagctgtggcttggctttgtgctgttcggcgcgctctacttcgggttccgcctgcctgcaacccggatcctgatgtgcttcgggctggttcaccttgccctggccttcgcgcgctatgccgaactgccggggttgctggccccgctgttgctgatgcccagcgtaggcccccagctacgcgcagccatccgtccggaaatcaagccacgcctgtcaccacggagtattcgaaccattaccgcgttgtgcatggccttgttcatgggcagcatcgccttccttgccaaaggcatccagcacgaccagagccgggtactgccccgtgaggccgtcaacgcggccatggcggcaggtgccgccgggccggtcttcaacagctacaacttcggcggctacctcatattctccggcattgcgccgctcatcgacggccgcgccgacctctacggcgacgatttcgtgcgaaggtatatggcagcctattctggcgatgccaaggtcctgcacgccctgatccaggaatacaagatccgatgggccgttctggagccctctagtcctgcatcaaagctgatcgatggcctaccgggctggcgaaaagtgcatgaggataccaatgccgtcgcctatatccgcggacaatagggccgtcacccgcccgcccgtgcccatttccggctagcctgcagcgcgcgtcgcacattgcggcatggcgggcgtcccggcccacctgcgtggccgtggcgggccacgccatggcactgcatggctgcaggcagcgttgggctgagcttccgcgctcatgcgatgccccgctccgcagggcgcatcggatcacagcttatagcgcagcccctgcggccatcggcaatgcgaggtggctgccttgccccccgcacctgccacggctctcgcccacgcgcgaactccaatcgcgatacacacccaataccccgcagcgccgcccccccccggcaggccgtcgacaagacgcgaagcctgcgtgaaccgcatgccttgtcgcgcggctcccccttcgcaagtcgattgcgcccacccctgcgcacgcctgcgattgcagcgaagaacagccatctcacatgccatgtttccaacgtgaatcacgcgcccgcgcgagcctggagccccctgcacacaagggtttgcagggagtgtctgtgaaacctgcaggcactctcgcggccctggcgtactttgcaatgtttcgatccggaaacgttgcctcggcagaaggcgttctcatccgtcagtctggccgtcaccggaaaaaagggagcgaagcagccaggaggactaccgactgcgacgaatgccgatcttcggcgcgaacgttgcctcatgcttttggatgaaattgccgccctctttcgtcagcgcggcccacttgagcacttcccgcgatctaggacatctgtagcggggtccggaatggcttgcaagacccgcgtttccacccagcaacgaagcgtggccgaaaagccgcttgcaggcccgccgaacctgcggccaccgcgcatcgctacccgcaaacccttgtggcacaacggtttccgctggcctggcctggcgtttgcctatgtcaggcacgcggcaccgcagtcctgactgccgcgatgccggcgcaacgttcgccggcatcagttccagaaagataaggggagtttcaccatgccagtcgcacgccaacctgcgatgccacaccggaatatcggccacgctgctgctgccaggggcaccagcagcgcgcagttccgttgcatggcgcgtgcaggccatgtgcagcacgccgcgcggtgcatgcatgcgtcggcacaacgccggctgcagtcacgcaacccacgcggtgtgcacggcggtcccggccagtggccatttcacgcctgcgcaatctgcgcgccgccctgctgccggatttccaagcattgatatcagatgccgttgttgccctatctgcagtttcaaagttctgcagtgcttgttcccaaccaaaggagtttgtcatgcaaaacctgaccaccatgatcaagcagttcatccgtgatgaagacggtgtgaccgccattgaatatggcctcatcgccgcactcatcgcagttgtcatcatcgtttcggtgacgcttattggcacgaacctgaacctcatcttcaaatacatcggcgataccctcaccaacgccgtaccggcctgatagccgatccgcacgcatggccgccctgttccggacggccatgcggcacggactcccgcccgacacgccaacacagacaccggagacgccaaatgccgaagctcctcgccaggtcaaaagattttttgcgcgacgactggggtgtctcctctatcgaatacgcattgctcggcagtctgatcgcaatggcaattgtcgtttccgtcgccacgctcagcaatgccgtgaaagccatgtacgagttgatcgcctccaggatgccctgatctatccgaccagcgcacgccccggacacaaaccaagctaccttccactatcgccatgcaagccgccactgccctcgcccccctcgttggccccgccacgatcggcatcgtgctcacagccgcggccatcgacctggaccgccgccgcattcccaactggctgaccttcggcgcctggatcgctgcgctgcccttgatggcaacaattcatggccctgccgccggttcgctggcgtggctctatggctggacggtgggcctggtgctgtttctgccgttctatctgatgcgcggcatggcggccggcgacgtcaagctgatggcagccgtgggcgcctggctcggcggcagcatggcgctgaagatcgcactggcaacctgcgtgattggtggggcctgggcgttggtacaggtgcttgccacaggacagggacgctcgaccctcgcccgagtgggccacatgctgatcgccgccctggtgccgggttcccggccggtgcaaccgcaagccgaggcgtcagccggctccttgccttacggcgtagcgattgccgccgggacgctgacgatgctctttgccggcacatgacacaagccacaagcgacacaacgcgccgaccagtcacgggcgcctgcaggaacgagaacacactgaccagcgaacaggggatggcaatgaacgagcatcacgactcaggtcacgcaccacggctccttgagcccgtcgcgaccggcaggaatgtccatgccgagcatggcacgctgccggtgccgccctggcacgtgctgccgcgcacgattgctgataccggcctggagatcgcacagttgctcgggctgctgatgaaggccgcctaccagcaccgcaccgtcacgctggcagtactgaccgacacgctcaagctgccggcactggtggtcaatgaaatcgcggccgtcgccgtgcgcgagcgcctgctggagatcgcgcaccgcggcgccagcgacctggatgtgcgcttccggctcactgacgccggctatacccgcgcggcggaagcctcggcgcgctgcagctatgtcggcactgcgccggtcacgctggatgcgtacctcgatgccatcaagcgccactcggtcaaccaagcttccgtgaccaaggcggacgttactgccgccttccatgacctggtgatcccggtccatctgctcgacgcaatcggcatggcgctgaacacctgccgcgcgctgatgatctacggcccgcccggaagtggcaagacttacctggcgcagcgcctgggcacgctgctgcctggcgcggtaccagtgccgcatgccatcaccgtcgccggcgaaatcatccaggtgttcgatccgctggtccatgtgccgttcgacgacagcgaagcctcgctggcgcgccgctcgctggaccgccgctgggtcctgtgccatcgcccggtggtgctgtccggcggcgagctgacgctatccatgctggacctgcgctatgaccgcgtctccggcttctaccaggcgcctcctcacatgaaggccaacaatggcatctacatcatcgatgacctgggccgccagctggttggcgtcagcgacctgctgaaccgctggatcgtgccgctggatcgcagcattgacatgttcacgctgcaaaccggcgtgcgcttctcggtgccgttcgatgtctggccagtgttctcgaccaacctcgaaccgtcggagctgggcgacgacgccttcctgcgccggctcggcagcaagctctacgtgggcccgctgtcggtcgacgactaccgcgaagtctatcaacgcaccgccgctggcttcggactgaccagcacggatgcgatgttcgatttcctggtcgacagcctgcactacgccagcgatacgccgctgctggcctgcatcccgcgcgacctgctgcgcctggtggactcgggcgtgcgctaccacggccatgccgcacaggttaccgaggcaggcctggtgtctgcatggcaaggctactacgggctgcgcgcttcggccgatgccatgccatcgctaggcgctggccatcgatggtcggatgaccatcgcgccgcaagctgaactgcaccaccgaaccatcggacaactgtagggggagaatcatcatgaaaaacacacgcgcaatcctgatgctgctgattgccctcgtcgccggcgtggcggcagtggtatccgcgtcgcgatggctggtccagcagtcgtccagctcggtcaggcaggtggtcgtcgccgccaacgacctcaacctcggccagccgctcaacggcagccagctgcgcatggtcagctggccgacaggcagcgtgccgcccggcgcgtttgaggacatgaaggcgctggagggccgcgtggtccgcaccagcctgcagcgcggcgagcccgtcctcgacgccaagctggcgccggtgggcaccaagggtggattgtccgccgtgatcaatgacggcaagcgtgccatcacggtccgcgtcaacgacgtggtgggcgtggccggcttcgcgctgccgggcaactacgtcgacgtgatcgtcaataccaacgaagaagccaagaccacgcagagcggcagcatctcgaagatcgtgctcgagaaaatcctggtgctggcggtagcgcaacaggtcagccgcgacgacacccagcccaaggtggtcaatgcggtgacgctggaagtcacgcccgaacaggccgagaagctcgacgtggcgcgtagcgtcggcacgctgtcgctggtgctgcgcaaccagctggatgtggccgacatcagcaccggcggcgccaccaagggaacgctgcttggcaagacaccggaggcaccggccaaggtggtgaccaagaccgagacgcgcaccgtagtcaagactcgtacggtagcggcggcgcccgcacgctcgggcaattgcatcggcgtgctggcaggcatgcagggtggcgtcgagtgcttctgagcacctacgccagccatccaacaaatcctgagctgcaacagcctctccggggggagattcaaaatgaaccagaaacgatccgaagctgcaggcggcacccgcatcctggtgctggccgccatcctctgcacgccgctggctgctgcggcgcaggccgccattgaggctggcaacctgaccaaggcaaccgcaccggctgccgccaaggccccccagggcccgatgcagatgaccatcagcatgacgcccggagccgccgcaccggccgcgtcggcgccgcccgtgacttcaggcgaggcgcgcgggcccaactgcaccggcgcgatccgcagcgaatcaagcgtgatggtgccggtcggcaagtcacagctgatcacgctgcaggagccggtgcgcaaccgcacgctgggcaatcccaatgtggtgcaggccaccatggtgtcgccgcagacgctctacgtgctcggccgcgcggtgggcaccaccaacatgatcgtgcagggccgcagcggctcttgcagcatcatcaacgtggtggtgaatgccgacgccggcgggctgcagacttcgctgggtcagctgttgcccggcgagcccggcatccgcgtcatgaccgccgccgataacctggtgctgaccggcagcgtcaccaatgcgcagaccgcgcagcaagccatggaaatcgcccaggcctatgccaatgccgcgcagggcggcgacggcaacaagaagggcggcgtgctgaacatgctgtcggtggataccccgcagcaggtcatgctggaagtgaaggtggcagaggtgtccaaaacgctgctgaaccaactcggctcgacggtgaacctgcagggcggcttcggttcctggagcggcgggctggtgacttcgctgctgaccggcgcctcgtccgcgatctttgccagcaaggccaacaaccggccattcgacatcgccatcgatgcgcaaaagaatgacagcctggtcaagatcctggccgagccgaacctggtcaccatcagcgggcaggaagccagcttcctcgcaggcggcaagatctatatcccggtggcgcaggccaatgtgctgaacggggccggcactgtcaccctgcaggaagaagagttcggcgtcggtctgaagttcacgcccactgtgctggccaacggccgcattcacctgaaggtatcgccggaggtgtccgagttgtcgcccactggcgccaccatccgcggcggcaccctggccggccagtccatcttgccggtgatcaccacccgccgcgcctccaccaccgtgcagatgcgcgacggcgagagctttgccatcggcggcttgctgacggacagcgcgcgcggctcgctcaaggcgctgccgggtgcgggcgaagtgccggtgctgggcacgctgttccgcagcacccagtaccagcaggacctgaccgaactggtgttcgtcatcacgccgcggctggtcaagccgatgcagaccagcaactacccgctgcccaccgacagcttctccacacccaacccgctgtcgctgtacttcatgggcaatatggaaggcagcggcaagcgtcagccgcaacccgtgccggcaccgtcgcagcccgccgcgccggccgcagcacccgccacgccgcccacggcaccgcgcagcgaaggcgcgcccggcacttcggtatcggccgtgccgaacggcaaaccgctggatgagcccgcgccggccgcaccggaacctgcacccgccgcaagcacgcgtcctgccctgccggccccggcgcccgcccgcaacacggcggccgcgcccccggccgaggacactaccgcgcgcatcgcccgcatcgaagccaccgccgcccgcctggcccaggccagggccgcggctactgccggccgcaccgcatcgggcggcaactgatccgccgcgccaccagcagaaccggagaacgaccatgaacaagacactgaagctttcgcgcggcgccgccgtcctggtgctcggcagcctggcctgcctgggactgtcggcctgcatgacctcgacgccggtgtgggacggccagcgcggcgtagcgctggcaaccgtcacacaaatgcagatcatcaatcccgacgcgcccgccgggctgcccactgtcaccggtaccgatggcaaaacggctgtggcagcgatgaagaacttcgaccgttcgctgtcagggggccagcaaggcggcgcaccctccatgactatcgacttcggcgccggcggctatggcggcgtgggcatgggtggcaacggccgctgagcaccagaaccgcaggagaccatcatgtctacatcgggcttcacacgatccaggctgacgcggcgcgcgcgccagcgtggcgcggttgccatcatcgtgggactgtcgctggcggtgctgatcggctttgtcgggctggcgctcgatctgggcaagctctatgtaaccaagagcgagctgcagaatagcgtcgatgcctgcgcgctggctgctgcgcgcgatgtaacgggcgccacgccgctgctcgtgtccgaggcagccggcctggccaccggcacgagcaacgctgccctgttccagggcaaggcagtggaaatgttcgaaaatctcaacgtctcatatagcgatacacctgacagcaccttctacaccaagaacaacgttccgttctcgctcgacaaggtgaagtacgtgaaatgcaccgccgagcgcaagggcattgcccactggttcatccatatgctcaacctgctgccggggatcgatatcaaggccagtaccgtcaatgccatggctgtcgccaccaccaccagcgcgcaagccgcctgtgccatcccggtttatgtctgctcgccgccaacggcgaatccggcgaaaaccgcgtacaaccggggcgactggatcaagtccagggtcgatccgagcgacccatacggtcctggcagctttggctgggctgacctttcgcctccggcaggcggcgcttccgaactggccgatctgcttgccggcagcggacagtgcgacctgccggtcgtgggctccaaggtgggcgagccaggcagcatcgcatcgctgatcgcggcgtggaatacccgcttcgggatctataccggctcatataaggacccgaaggacggggcgcccgactttaccggctatgcctacaccacgaccacgtggaatgcgccgaacggtggcaacgcctaccctgactttatccagaagcgggcagtcaacgagccattccagactgacagtgggttggacgtcaagggcacgccatcacccaggcaggtgcatcaggccggcgccgatcgcaggttggtacaggtgccgatggtgaactgcaatgaccttgccgaggacaagcaagctacggtgatctcctggacctgcatgctgatggtagagccaatgcaggaacagagcgcaaaggctgtgaccaccctcgaatatctgggcgactcgaaggaccccaccagcccgtgcgcgacccagggcgtgcctgggtccagtacgggctcaggcccccgtgtgccggtgctggtgcaataggagcgaatcatggcgcaatgcaggcagcacaggagcaagctgcgcggggtggtcgcggtggagttcgcactggtcctggtgcccttgctaatcctggtgaccggggtggcggagtacgggcgcgcgatctaccagtacaacgccctgaccaaggccacgcgcgatgcggcacgcttcctttcgcaatatgcgcccagcgagccgaactacccagttgaccaggcgaaatgcatcgccgtctatggcaagaccacttgcggtggcgcggcacttgtgaatggcctcagtccgtcgatggtagtcgtctgtgaccgcattgactcgaccggctgcggcagcaagcagtttgccaacgtcgccatctacgaggggggcgacagttcacgcccgccggcgggcaccatcaacctggttgaagtgaagatctcgggctttacctactcgccaatccagtcctacctcaatgtgggagccctggcgttctccgatatcgcaacggtaatgaggcaggtgctatgactccaatccgtgccatgcaccagcgttcacgccaggccggcgcaaccgccatcgagttcgccctggttgccagcatcttcttcatgctgctgatcggcattgcagaattttctcgcgtgctgttttactggaacaccgccggcgaagccacccgactgggtgcacgcatcgcggtggtgtgcgacgtcacagacacagccatcaaggacaggatgacgtatctgatgcccttgctgaaggacaccaatatccaggtcgcctacgagccaagtggctgcgacgccgacgccgacaccgcgcgcaattcttgccgctccgtcaccgtcagtgtggctgacgtctcggtcaagaccttcattccggtcgttccgatcacggtatcgatgcctccgttctccaccacgctgccgcgggagagccttgactctgccaccagcggcaagatctgcaactagcgcgcatgaaccaggagcacaccatgctcagaattctgatcgtttccgaagacgccgaccggctggccgagatcaaccggctcagcaccgtagttggcaacttccaggccatgacgctgcaggaaggcctgtctcgtttcccgttccatgccagccggctgcgcatggccgacctgctcatcctggaactgccggccatcaatgcctcgcagatgcacgccatcgagaccctgcgccagcaacaccctgaactgccctgcatcctgatcacgcaggcacccagctccgaggtgctgatcaaggccatgcgtgccggcatccgcgatgtgctgtcgtggccgctggacaaggggcaactggccgaggcgcttaagcgcgtggaagtcggccacgtgccgcgtgcgcaagaaaccggacaggtgatttcggtaatctcgtgcaagggcggcgcgggtaccagcttcgtggcggccaatctgggcgacgcgctggcccggcaccttgacaagcgcgtgctggtggtggacctaaaccggcacttcggcgacctgacctatatcgtcagcgacaagaccccgccctccacactgcccgatatctgcagccagatcgaccgtatggatgccgccttcctggaagcctgcctggtgcatgtggacaacggcttcgacgtgctggcgggtgcggccgatccaatcaaggccagccagatccagaaggacaagctggagtggatcctctcggtggtgcagccggcctatgacttcgtgatcttcgacctgggccagagcatcgacccgttgtcgatcggcatgctggatcacagcgaccgcatctgcgtggtggccgagccagccctctctttcggccgaccgggccgtcgcctgctcgatatcctgcgtgcgctgcactaccccaccgacaaggtccgcctggtgctgaaccgcaccggccgcaagaacgagatgccgcgcgcaacgatggaggagatcttcggcatgaaggccgcctttaccctgcccgacgaccccgctgccgtggatgaggccgtcagccacggcgagcctgtcgccaagctgagccggcgcagcgccatggcgcgcgcgctgcaggccatggccacgcagctgtgcgccacgccggaagccgagcggcgcagcaggcccgaatcggtatcgccgctgcgcaggctgatgctgcgcgcgcggagcacctgaataccctgacaacggccagcctgggcggcggccaaccgaagccgataacgaggagttcatcatgtccattcgcgagcagctggccaatgccgggcctgccttcactgccaacggccacgccgcaatccagtttgcgacgtcggcagcctccgtgtcgggcggctaccaccaactcaagcgcgacgtgcacgagaccgtgctggaccgcgtggagctggagcggctggcgcgctatccgcaggagcaggtgcgacaggagatcgctgcactggtcaacctgatcatcgacgaacagaaagtgctgctcaacgaaaacgagcggcgccaactgacggttgagatctacgacgagatgttcggcttcggcccgctcgagcccctgcttcatgaccccaccgtgtcggacatcctggtcaacaccgcacgccagacctatgtggagcggcgcggcaagctggaactgaccgacgtggtgttctacgacgacgcgcacctgatgaaggtgatcgagaagatcgtgtcgcgcgtggggcgccgcatcgacgagaccagcccgatggtcgacgcacgcctgcccgacggctcgcgcgtcaacgccattatcccgccctctgccatcgacgggccgctgctgtcgatccgccgcttttccgtgaatccgctgcaggtgtccgacctggtgaacctgcgcagcctgacgccgccgatggcgcagctgttgcaggcgctctcgcaggccaaggtcaacgtgctggtgtcgggcggcaccggcagcggcaagaccacgctgctgaacatcctgtcgggctttatcccggaagacgagcgcgtggtcaccatcgaggatgcggccgaactgcagctgcgccagccccatgtgctgcggctggaaacgcgaccacccaatattgaaggcaagggcgagatcacccagcgcgcactggtgcgcaacgcactgcgcatgcgccccgaccgcatcatcctgggcgaagtgcgcggcggcgaggcgctggacatgctcaacgcaatgaacaccggccacgagggctcgctcaccacgatccacgccaacaccccgcgcgacgcgctgacgcgcctggagaacatggtcagcatggccggcctgaccatgccggccaaggccatgcggcagcagatctcctcggccatcacggtgatcgtgcaggcggcgcgcatgaccgacggccggcgcaagatcatcagcatccaggagatcaccggcatggagggtgacatcatcaatatgcaagagatcttcaccttccagcgcacgggcgtggacaaggatggcacggtccgcggcaatttccgggcgaccggggtctatcccaagtttgccgagcggctgcgcgtgttcggcgtggggctgccggatgagacctatgacccggccaagcgcttcgaagtctgatccgcctggcacgatacaacaacaaacaatcccggggagctacacatgagcacgatcttctacgccttcggcatcctgctgttcgtggccgtggtgctctgcgtcgagggcatctacctgtggtggagcaacgcccatggccccgcggccaagcgcatcgaggcgcggctgcgggcgctgtcggcgggcggacatgtcagcgcagagcagttgtcgatcctgaagaagcgcatgctggcaggctcgccgcgcttgcagaagtggctcatgagcgtgccccgcgtgggcgcgctggaccggtggctggagcaatccggcagcacctggtcggtggcgcaactgctgggctactgcgcgatggtggcgctgtgcacggtggcactgattccgctgttgccgatcccggtaccgctggtgctcgccggcgcggcgctggccgccctgctgccagtgctgcatgtgatgcgccagcgcgccaagcggatcaagcggatggaggcacagctggctgatgccgtcgacatgatcagccgtgccctgcgcgccgggcactcattcagtggcgcgctcggcatggtcgggcaggaaatgaaggccccgatcgggccggagttccgcaccaccttcgaggaaatcaattatggcgtggcactggacgaggccatgaccaaccttgccatccgggtaccggtgggcgacctgcgctatttcgtcatcgcggtgctgatccagcgtgaaagcggcggaaacctggcggagatcctcgacaccatcggcacgatggtgcgcgagcggctgaagctgttcgacaagatccgtgtgctgtcggcggaaggcaagatgtccgcgtgggtgctggggctgttgcccttcggcactgccgggctgattctggtggtgaatccaggcttcatgaaggtgctgtgggaggacccgattggcttgcgcatgatcggcggcgcgctggtatcaatgaccttcggtgtgctgtggatgcgcaagatcatccgtatccgggtatgaatgtgcagcgtgcggttccacaagtacatgcagtgctcgaagaagcagggcttggacagctatcctgacgggagtccatcatgcaaggcattatccaggggtttcaggcggaccagtttgtcgtgctcgcgctgatcttcgtggcggcgttcggcacggtgttcggggtgctctacgtgttctcgcccaaccgcttgcgggggcgggcggagcagattgcaggccaggcgggtcagctcggggctgatcctggcaagcagaatccgctatacgaaaagctggtgcaatgggcgcagccggtatcgcggctgtcactgcccaaggaggggtgggagagctcgcagctgcgcgtgcgcttcatgaacgccggctggcgcaatgccagtgccgcaccgctgtactttgcggccaagaccgttctggccatcgccctgccgatgatcgggctgctggcagccgccggccagcccggcctgcaggaccggaatatcatgttcgcgttgctggcagtgctgggggcaatcggctactacctgcccaacgtcgttctcgcgcgcaaggtcgcgcagcgccagcgtacggtgtttgaagagtttccggacgtgatcgacctgctgaccgtctgcgtggaggccggcctcgggctcgatgcagcgctgatgcgcgtggccgacgagctggcgctgcgctgcccggtgctggccgatgagctccagctgatgctgctggagctgcgctcgggcttctcgaaggaaaaggcgctgtctaacctgtcgctgcgtacaggcgtggaggacgtggacaagttcgcctccatgctgatccaggccgaccgcttcggcaccagcctgggcgagtccctgcgcgtgctgtccgacatgctgcgcaccaaacgccgcatgcgggccgaggagcaagccgccaagatcgcgctcaagctgttgttcccgctgatcttcaccatcttcccgtcgctgttgctggtgctgctcgggccagcctttatccagatctatcgcgttctcctgcccaccatggccggacagggagggtaatacttccgggaaaccgtgatcgtttcccccggctgtctcccggtgcaatgccggctagacagtcacttgcccggacctggttccgggcttttttgcttttcgtcgggattcgcgggacttgaccagacgggctggcttattaagaatgcaggcaaccacccgccgccgtagcggcccatgcagcgagccccatgcgcctccggagtccccatgaagctacgcatcctgagcgacctccacatcgagcacaacatgccgcagtccgtgcctgcctgcgatgccgacgtcgtggtgctggccggcgacatcgccaacgggcgcgacggcatcgactgggccgcgcgcaccttcagccagccggtggtctatgtgcccggcaatcacgaatactacgaaagcaacttcgataccgtggatcgcctgatggccgaagccaccgaggcgcacccgggcatacaggtgctcaatggcaccgtggccgaattcaatggcgcgcacggacgggtacgcatcatcggcactacctggtggactgactacaccctgttcggcactgaccggcgcgatgacgcgatgcaggcttgcgcggctgtgatgctggatcaccgcctgatcgaactccacggcgacgacggccgtccgcggcatttcacgccccaggacgcgctggcgcgccaccaggccgcgtcggcctggctggcggcgcaactggcgcagccctacgatggcaagaccgtggtggtcacgcatcacggccccgacctgggcagcctggacccgcgctactcgcacgacctggtctcgggcggcttcctgtcgcgccggcccgacctggtagcaaaggcggacctgtggatccacggccatacccacaccagcttcgactactgcatcgacgattcgcgcgtggtctgcaacccccgcggctacgtcagccgccgcaccggcgagctggaaaacaagcgcttcgactggtgctgcgtggttgtggtctgacgcgcgccggagccggcctcagcccttgccgcgcgcatccctcagttgtagttgaaattgaccgttgccacgctgtcgaccgtgcctggcgtgaccgggcctacccggtagtacctcacccccaacggaatggccatggtcattgccgcgccgacattgcccatgccgacatcggcgttgagcggcagcggggtgcccgccgggccgccattcagcatctgcaggccaacgccttgcgccgagccgttgttccgcaggacgctgcccacggcggtggcatcgccgctgatgttcatcgtgacgatcgactgggtgacgcaattctcgagagtgagcccgaatctcgtcgcgcccgcggtcgagccgatggtgggcagggacgaggcgctgatcttgggcaaggtaatgacctggttcgccgtgccggcgctgaggttgcagcttggcggaatgaagcggaaggtcactggcgaagtcatttgctcgccgaactgggccgtccacggccccggtcccgagccccccgtccagctgtcctggtagccgaagcgcatcaggctgtcactgaacgtgccgctggtcagcaccgtgctggtccgcaccaggtccagccggaaccggaaggtctgggtcgaggtgcccagcggcatcgtgcaaggcaccccgcccgaagccgcccccatgcagttggcaccgaagttgtcgccgccgttggtgccgtagctggtcggtgcaatcaggttgccgtcgggcatgtacatgcgatagcccagtcccggcatggcggtggcaaaggtctgctgcgagatcgaagtcgccaccagcggcgtctgcggcgtgtagttcagggcccagccattggtagatggatgccgcagtccggtgtcgtcgcacgtcaccgttacggtaatggtggcgctggagatcacctggccgatgccggtggtcttgctgatgctcaccgtggccggcaggaacggcgaggtcacggtggttcccatgcaggcagcatgcgcctgggcgtatgccaggcacatgagtgccgcacaggcaagcaccgaaggcacgcgcctgatgcacgcggtggcatgaaccagccagcgtcgtggcgatgtagtgatttcgttttccatggcagccatgctaggaggtgggttgatccgggatttgcccgcgggttcaataggcggcgattagaaatgtagccagcgccttccgctccacaaatagggcaagccttagatcagggtgagagttttctgcgctcgtgcatggcaaggcgcgagcgtcgcgctgcccggaacgaaaaaacccccgcgggctcgcacccgcgggggttcttcaagacagcctgcccgtaagggcagtcggtcggcgatgaattacatcatgccttccatgccgcccatgccgcccatgccgcccggcattgccggagccgattcttccttcggcgattcggcaactgcgcagtcggtggtcagcatcagcgaagccaccgaagcggcgttctgcagtgcggtgcgggtgaccttggtcgggtccagcacgcccatttccaccaggtcgccgtactcgcccgaagcggcgttgtagccgtagttgcccttgccttcgataaccttggcaacgaccaccgaagcttcttcaccggcgttcagcacgatctggcgcagcggctcttccatggcgcgcagcacgatcttgataccggcgttctggtcggcgttttcgccggtcagtgccgagatcgcagcgcgggcacgcagcagggccacaccaccgccggggacgatgccttcttccaccgcagcgcgggtggcgtgcagggcgtcttccacgcgggccttcttttccttcatttcgacttcggtggcagcgccaaccttgatcacggcaacaccgccggccagcttggccacgcgctcttgcagcttctcacggtcgtagtccgaggtcgcttcttcgatctgggcgcggatttgcttgacgcggccttcgatcgcagctgcgtcgccggcgccgtcgatgatgatggtgttttccttgccgatctcgatgcgcttggcctggcccaggtcgttcaggccagccttttccagcgtcaggccgatttcttcagcgatgacggtgccgccggtcaggatggcgatgtcttccagcatggccttgcggcggtcgccgaagcccggggccttgacggcggcggtcttcaggatgccacggatgttgttgaccactagggtcgccagggcttcgccctcgacgtcttcagcgacgatcagcagcgggcggccggccttggccacttgctccagcaccggcagcaggtcgcggatgttgctgatcttcttgtcgaacagcagcacgaacgggttgtccagctggacaacctgcttttccgggttgttgatgaagtacggcgacagatagccgcggtcgaactgcatgccttccacgacttccagctcgtcggccagcgacttgccgtcttcaaccgtgatcacgccttccttgccgaccttgtccatggcttcggcgatgcgctcaccgatggaggtgtcgctgttggccgagatcgcgccaacctgggcgatttccttgctggtggtggtgggcttgctgaccttcttcagctcttccacggcggcggcaacagccttgtcgatgccgcgcttcaggtccatcgggttcatgccggcggcaacgaacttcatgccttcgcgcacgatcgactgggccagcacggtagcggtggtggtaccgtcaccggcgttgtcgctggtcttggaagccacttccttgaccatctgggcgcccatgttctgcagcttgtccttcagctcgatttccttggccacggacacgccgtccttggtcacggtcgggccgccgaagctgcgctccagcaccacgttgcggcccttcgggcccagggtcaccttgactgcgttggcgaggatgttcacgccttcgaccatcttggcacgtgcggcgtcgccgaacactacgtctttagctgccattcttgaatctcctgaaatctgtacggggtggcggtcagttggtgaattacttgttcaccacggccatgatgtcttcttcgcgcatgaccagcagttcctggccttccaccttcacggcctggccggcgtacttgccgaacagcacgcggtcaccgaccttgacgtcgagggcgatgttgttgcccttgtcatccttcttgccaggaccgattgccagcacttcgccttgatcgggcttctcggcagcgttgtcgggaatcacgataccggacgcggtcttggtttcgttgtccagacgcttcacgatcacgcggtcgtgcaaaggacgcagattcatacggactcctagatacaaagtgagtttttgatcacaaatcggccggctaccgaggcgacggccgtcagaaatgttcaggtgtcgcaggaggctgttagcactcacccctgacgagtgctaattatagggacggggtaggggcatttcaagacgcgggtgtgatgcgggttttcccgaggagcggttgatgccttgcgcggcatgggctcccggccggcaacgacccgcctgtaggaataatcccggcacccattcgggcgtgtgcctgacagcgcaacgtggtgccgctacctagactgggcttgtcgccgcgcgcccgtcttggccggatgtacggcgtacgccgcgccgagcgcttccgttgccggcgcctccgacagcgactctggaggtattccatggatacgaaacagcctgctcgccttacccgaatcgccagcgtgattgccgcaggcctggctggcctcagctgcgctgcggccattgcccagacaaccgccacccccgctaccccggccacgccggcaacccctgctgcccagggcatgcccgcgaccccggcgatgccggcaacctctgccacgccggcaggcggccagggcgtgccgcccggcatgacccagatcgagccgccgaaggacccgctggtggaacgccgcgaggcgcgccagaaggccgccgccgagtacaaggccaagaagaaggcggccaagggtgagtacaaggaagaagtcggcgctgccaagcaggagcgcaaagtagagaacaaggcagccgatgcaacggccaagcaggaaatggccgcaccaaagcaatagcgccagcctttgcgagacgggtggccgggatcagccggccaccttcttcttgccagacatacccctcccgtttgcccttcggcagcatccggaccctggcggcttgcaagaggcaggatcgcgcctagactcgatacgagcgagtcgtgcgcctttctgcccggcttgccatctgcgccatgtccgctgcccacccacgccactggttcgcaggccttctcctgtccggcctggtgggcgcactcagcctgtgcagcacgtttgccgtagcgcagcagaagccggcgccggcgtccgcgcccgttgcggcccccgcggcgaaagccgcaaccggcaaggcagatgtcgccaggccgcgcggcctcaacctggccaacaagccgcgcatgggcgacttcgatgtgatggtcaacagtcgcgtcatccgcgtgctggtgccttacagccgcaccctctacttcagcgacaaaggccacgagcgcggaattaccgcagaactggtgcgggaattcgagcgctacctgaacaagacctacgccagtcgactgggcaagcgcccgctcaccatcatcatcatccccaccacgcgcgaccggctgctgcccgacctggcggcgggcctgggcgatatcgccgccggcaacctgaccgagaccgaggcccggctgaagatggtcgactttgccgcgccgcgcgaccgcaagccagtgcgcgagctgatcgtgaccggccccaagtcgccggcgctgaagagcctggacgacctggcgggcaagaccgtccacgtgcgccgcgcgagcagctactacgacagcctgactgcactgaacaaccgcctgcgccagtccggcaaggcgccgatgaagctggtgctgctgcccgatgcccttgaagacgaggacgtgctcgagatgctgaacgcgggcctgctggagatcgtcgtggtcgacgactggaaggccgcaatgtgggcgcagatcctgcctgacatcaaggtgcgccaggacctggcggtgcgtgaaggcggctatgtcggctgggccttccgcaaggacagcccgcagttgcggcaggtcattgacgatttctatgtcaattacgtcaagaagcagggcatggcggaatacctgatcaagcaatccatgcgccgggtcaagcagatcaagaacaacaccgaggacgccgaatacaagcgcttccagcagaccgttgccttcttcgagaagtatggcaaggaccatggcttcgacccgctgatgctggcggcacagggcttccaggagtcacagctcaaccagcaggcgcgcagccgcgtgggcgccgtcggcatcatgcagatcatgcccgccaccggcaaggaactgaacgtgggcaatatccagatggtcgagtccaacatccacgccggcgccaagtacatggaccggctgatgacgaagtacttccccgacgcgcatttctcggaatccaaccggccgctgttcgcctttgccagttacaacgccgggcccggcaatatcgccaagatgcgcaaggaggctgcggcgcgcgggctggatcccgacaagtggttcaacaatgtcgagatcgtggtggcggagaagatcggcatcgaaaccaccacctatgtgcgcaatatctacaagtactacgcggcctaccggctcacgcaggaccgggaggccgcgcgtgagcgggcactgaaggaagtccggaagtagcccggccacgccgcaaggatcagtcggccagtccgctggcgtcgatatagcccagtgcctcggtcacggcgcggcgcgccttgagcacgtagcaaacgcggcgctcctggatcgacagcgccagcacatcggcctgcaccagttccaggaacacgtggccggcgcgcgccaggctcagccgtgcgacctgcgccaggtcggtggccggcaggcccgcctcgccggcctccagcagcgcccggcagatccggatccgcgcgggctcggtcatcagcgcaagggtcagcgtactttcctgggtctccatgatcacacctcggtctccgggcacgcccccggtccgcgaaacgcggcggcagggcggtgctggcgtatttttttccgcgctgttccttgcgcgcagtttttcccgttctacgcggctcgccgcgcaaacgcaatagggtggagccacggcccggcaaagactggtgcgattacaacaaatagcgcgtgccagccgcattcgggggatgcgcgatgcggctgcacctccccttcggcggccggctgcggtcagaccatcaagccatcacaaacggcaattgccgctggcgcttgcccgtcagcgtgaacagcgcgttcgccactgccggcgcgatcggcggcacgcccggctcgcccaggccggtggggttctcctgcgagggcacgaagaacacgtccaccaccggcgcatcggtgatgcgcggcggcggatagtccgggaagttgctgttcttcacggcgccgttctcgatctcgatggcaaaccccggcttggtcatggccagcccaaagatgcaggcaccctggatctgggcctcggcggacatcgggttgaccacgcggttggcatgcacgccggcggtgacgcggtgcacgcgcggctcgcccttcaccaccgagacgtcgaccacgtaggccaccacggtgttgaacgactcgtgcacggccacgccccaggcatggcccttggacagcttgcgcttgccatagccggacttgtccaccgccagctgcagcgcggcgcggtggcgcgcgtgcttcttctcgtcgagccgggccaggcggaatgccacggggtcctgcttcgaggctgcggccatttcatcggccagcgtttccttgacgaaggcggtatgcgtattgcccaccgagcgccaccacagcaccggcacgtccacctgcggatggtgcaccgacatctgcagcggcaggtcatagtcattctcgacgatgccttcggtcatggtggcgtcgacgccgttcttgaccatgaagggctcgaacggcgtgcccttcaggatcgactgaccgacgatggtgtgctgccagcccaccaccttgccctgcgcatccagcccgatgcgggcgcggtgcaggtgcagcggtcggtagtagccgccgcggatatcgtcctcgcggctccacaccaccttgagcggctcggtgtggccggcggctacccaggccttgagcacgttggccgcttccacgatgtagtccgaggtcggcaccgcgcgccggccgaagccgccgccggccatcatggtgttgagcaccaccttgtccggcgccagccccagcgtgcgcgccaccgcggcctggtcgacggtctggaactgcgagcccacccagaccttgaccgactgcaccttgccgccggccacttccggctgcagcgtgcagttcagcggctccatcggcgcgtgcgccaggtacgggaagcggaagtcggcctcgatcttgcgcgcggcaccgttgatggccgagccgatatccccgctccccgcgcgcgccaccgtgccgggctggccggccagccttgcgtattcgtcgaagagcgcctgcgacgacaccttcgagcccgcgtcttcccactggatctcgagcgcatcgcggcccatcttggccggccagtagccgctggcaatcaccgccacgccactgccgccgcggtcgaccggcacctgcagcacgccgcgcacgccctgcaccgcgcgcgccttgtcggcgctgaagctcttgaccttgccgccaaagcgcggcgggcgcgctaccacggccaccaccatgcccttcaggtgcgtgtcgatgccgaacggcgtggtcgcgtccatcttgccgcgcgcatccagccgcggcgtgggcttgccgacgatacggaactgcgacgggtctttcagcgtaacccgctgcggcacgggcagctccatcgccgccggcgccagttcgccgaaggtggcccggtggctgccggacgtgaccacgccctgctccaccttgcagctggccggatcgaccttccattgctgcgcggcagccgccaccagcatggcgcgggcgcgcgcgcccagttcgcggtactgctggaacgagtggttcagcgcggtggagccgccggtcatctgcatgccgaagccagggtccttgtacggatcgccggccggcgccagcgtggcgcgcacgttgcgccagtcggcgtccagctcttcggccagcgccatcggcaacgcggtgtgcacgccctggccgaattcgagccggttcacggccacagtcacggtgttgtccggcgcgatgatcaggaatgcctgcggcgccggcggcggcgccttgggcttggcgccctcctgtgcctgcaccagcggggccacgcccagcgccaggccgccgccggcgaggccggtcagcttcaggaaactgcggcggtccagcgtggccacgccggtgttcggacgcgcttcgccgctattgccggcctggccgcctgccagggcttcgatgcctcggatacgcatattggtttcctcccgctcaggccagcgcacgggcggcgtctttgatcgccgcgcggatgcgctggtacgtgccgcagcggcacaggttgccggccatggcctggtcgatgtcggcgtcggtgggccgcggcttggtgcgcagcaggccgatggcgctcatcacctggccgttctggcagtagccgcattgcgccacgtcgtgcttgagccaggcgtccatcacggcgcgcccgaccttgtcagtgccgatgccttcgatggtggtgatgcgcgcgccggcagccgcggataccggcgtcacgcagctgcgcgtagcctggccgttgacgtgcacggtgcaggcaccgcatgcggccatgccgcagccgaacttggtgccggtcatttcaaggttgtcacgcagcgcccacagcagcggcgtggacgggtccacgtcgacttcacgggtcttgccgttgacgttgatattgagggtggtcatggggggacactccttgggtacgttgcccgctggttctttccagtgcccccgccgggcgcaatcgtgcggcgcgcgggcactgcccatgcgccgcagcctggcgcaaaggacaaatgaggatagtgcaatttcggtcaccttgccggacaccatgcgcactaccctgcccccgaagccgttttgcacgaactttgggcatgtggcggctgtccctcatgaatcccttcgctttccgatttctgccgccgcaacagtgccatcgactgttccagaacacacttattccggcgcctccgcggcaccggtcccgcacgccaccgctgccacgcgcgtgccggcggcccagtccccgtcagtggcgcggctcgacagcatccaggccctgcgcgggctggccgccgcgttcgtggtggtctaccactccggcctggcgctgggcggcgccgatgcgccggcgctcaactggctgaccgacaacgtgatcaagcgcggccatgtcggcgtggacgtcttctttgtcatcagcggcttcatcatcgcctgggtcgcggtgctggcgcggccccagcccgagcgcccgctcagcttcatgatccggcgctgctgccggctggcgccgccgtactggaccatgtcggccatccatgcgctgctgctcaatccggtcacgccggcggtgttcgcggcgtcgctggccttcctgccgactgccaccggccacgcgccgtactatggctacccggcgctgtacgtgggctggtcgctcaactatgagctggcgttctatgccgccttcgcgctcggcctgctgctggccgggcggcgcgcgctgctggtggtgctgggggtcttcgcgttggccacgctggtgctgccgtggtggcgcttcggcgcgctggcggcagatccgacgcagggctacccgttcgccacgccgtggctggccatggccagcaatccgctggtgctggaattcctgctgggctgcggactggcgtgggcctacgcgcgctggcgccacctgctgacgccggccatcgcggtgggcatgctggcaaccggttgcgcggcgttcgcgctgtcgctgccgctggtcgggcccgacttcagcctggccggacgcgggctgcccgcggcggcgctactggccggcgccgtggcggccgagcacgccggcgtgctgcgcgtgccgcgcgtactggtctggctgggcgaactgtcgtatgcgctgtacctgacgcaccccaccgtgatcgagggcgtcaagcgcctgatgcccgaactggcgcccggccagaccgcgctgcaactgctgcgctttgccatcgatgccggcctggcgctggcgctggcgctactgctgcaccgctgggtggagctgcccggcatcgccgccggccggcggctggcgcggcgctgacgcgcgcgctcagcgctgcggcatgccggccaggaacagatagagcgcggtcaggtcggtatcgttcatgcgtccgaacgaatcgaacggcatcacgcggcttacttcggtgccatctgggcgcttgccgctgcgcatcatcgcgataaaggccgaagcctggccgtagcgcgacatggcgccgcccggcacggggcgcaggtccgccgcgggcggccagtcgggcggcgcgcccgggatcttgccgccgcggaagtccggcccgtgacatcccaggcacgcattggcgacgtagccgccgtacctggccgtgggcgccggcaccattgcaggctgcaccggcaagctgtggtcgatcttggcggccgcgtcctgcacgatgcccacgccgtacagcgcccgcaccagccatggcatgcggatttccgcgggcgcccccatcgccggcggcaggctgcgcaggtagcccaccagcgcgcccaggtcctcgtcgctcaggcggttgtagtcctcgctgggcatgatcagcagcggccggtgcgagggcgccacgccatggcggatgctccgtacccagtcaaccggctggtaggcggcaatgtccggattggcgcgcgtcaggtccggcgcgcgcacgcgcaggccgccggggtcgtcgatcacctgcttgccgccgccgccggcaccgtggcattccatgcagccgcgcgattcaaacaagtacttgccgagcgcgatgccggcggcatcttcacggatggcgatgggtgaaaccttgacctcgacaatgcgcgacgccttgcgctcgccgacccataccgcggcataggcccccacggccacggcgacagccgtgccggccagcccccatgccgccacccgcagaaatcgcgccatttgccttcccctgtctgccgcactggatgcagcagcttgccgccagtgggcggggggctgtcggtggggcaggccacatagcggcggcgcgcgcctcggtcaggccagcccggccggggcccggtcgatgaagccggtcatgcgcgccagccggccatcggcggaaatcgtggcgaagtcggtgccgaccaccagcgccggctctcccgccggggccagttcccacgtaaagcgcaggtgctcgccgtgcgcatcgaccgggctcacgcgggtaaagcgaaacccggggaacttcgtctgcaccgcgacgatcatcgcgtcgatgccagcatggccgtccccgcgcatcagcggatcgacatagcttgccgattccgtccacgccagcgcgatcagctcgcgccggcgcgcggcatcggtctcgttccaggcggcgaggtagcggtcggcaagggtggtgggatcggcagtgacttgggcttggatggcggcagacatggcgtactcctggtcttggttgggaatccgtatagcggcctcaggtcaggccatggctgcatgatgggcgcggcggggccgtggcgcgattacccgtgaggttatgaactggcttacccgcatgcctgacggtccctaccaaaaaatcgcccccagcaccagtgccaagatagcccccaacctgccccctgtcctgccaatggccgcgtccttatcctcgctacattgcccctacgctgggcggcattccgtccccgcatccggggccgtgccgcccgggcgcgccgggcaagccgcctcctcccacccagacgcaccgcctttttgcatcgttctcgtccatgacgccccacacggccccgccgagccaccaggccgccaacgaccatcctgccccgcagcgccgctggctgcccttgctgctggccggcgccggctatttcgtgctggcggcggctgcgctgtggctggcgcggctgcccggtaccgtggcggcggtgtggctgcccaacgccttcgggctgggcctgctgctgcaccggccgcgcgcggagggaccgtggctgctggccggcatgctgggcgccagcgtgctggccaaccatgcggccggcgacagcgtcgccaccgcgctgatgctgaccggcgccaacctggccgagatgctgttcgcgctcgggctgctgcgcctgctggaccggcatgccgtcctggggcgccacggtccgctggccgccttcgcggtgatgctggcggtgggcggcatcctggcgccggcactgggggccaccgccggcgccatggccatcgccgcgacccatggcaccagcttcgcctcggtctggtggacgtggtggcaggccgacgcgctcggcatggcgctgttgctgccgatgatgttgtcgatgacggaggtgcgcgtgcgcgccgccgtcgcgcggccggtgctggcgccgcaggcgggcgcgctggcgctgtgcctggccatcggcgcctttgcgcagtggcagagccatgacccgtttgccgcgatgtcgctgccgctggtgctggtggcgctggccggcaatccgtttgcgaccgcgctgctgacgctggtggccacactctgcctgcaggcgctgatgctgctcgcgcaccgccatgaagcagtgccgctgtcggcggcggtgatcatggtgttcccggtctgcatcgcctacctgaccgagcagaaccggcacggccgcgccagcctgcgcagcagcgacaagcgctttcgccaggccatggagcattcagccatcggcatggcgctggtcggcatggacggccgctgccagacggtgaaccgcgccatgaccgagctgctgggctacagcgcggccgagctgcacgagctgagctaccagcagctgacccaccccgacgacctgaccggcgacctgcgccaggtcgacaacctgctgtccggcaagatcgagtcctaccgcctggaaaagcgctaccgccataaggacggccattaccgctgggttctgctggcggtgtcgctggtgcgcgacgaacagaccggcgagccgcagcacttcatcacccaggtggaagacatccacgcgcgcaagctggcgcagcaagagctggaacggctgtcacgccgcatccagctggcggctgaagccggcggcgtgggcatctgggagtgggacttcaccagcgccggcgtcacctgggatgcgcgcatgcatgcgctgcacggcaccgaccccgcgggcggcacgccagtggtggagcaatggatcgcgatgctgcatccggacgacgtcagccgcgtcagcggcgagatgcgccaagccatccgtggcgaggcgccgttcgataccgaataccgcatcgcacgccccggcggcgacgtgcgccacgtgcgcgcgatggccatggtcacgcgcaccgacgatggcaccgcgcaggccctggtcggcaccaactgggacatcaccgagcagcggcgcctgaccgaggcgctgttcgaagagaaggaacgcctgcacatcacgctgcgctcgatcggcgatgcggtgatctgcaccgatgcggccatgcacgtgaccttcatgaacccgatcgccgaacagctgaccggctggaccatggccagcgccaccggcctgccgctggagcaggtcttccgcatcgtcgacgaagccaccggcgaccccatccccagcccggtcgaagcctgcctgcgcacgctcgcgccggcttacctgcaggacggcgccgtgctgcagagcctgaccggcgagcgccacgacgtgcaggactcggccgctcccgtgctgaccgcgcgcggcgaggtgctgggcgcggtgctggtgttccaggacatcaccaccgcgcgcgcgctgcagcgcgagctggcgcgttcggccatgcacgatgcgctcactggcctgcccaaccgcacctggttcgagaagcgcctgcgcgaagcctgcgacgcggcgcggctgcacggccaccgcgccgcgctgtgcttcatcgacctggaccgcttcaagatcgtcaacgacaccgccggccacggcgccggcgacgtgctgctgcgcgaactgggctacatgatccgcaaccacgtgcgtcccgacgacgtgctggcgcgcctgggcggcgacgagttcgcgctgctgctcaaggactgcaccgtcgaccaggccgaacaggtctgccagggcgtgatcgacgccatccgcggccgccgcttcccgtgggaaggacgcgtgtacgacatgggcgccagcatcggcatcgccgcgatcgacctggacgtgcccccggtcagcgaactgatgagccgcgccgacgtggcctgctacgccgccaaggccgccggccgcagccgcgtctcggtctaccgccgcgacgagagcgatgcgcgccgccaccaccgcgagctggaagtcgccgccggcatccattcggcgctggaagcgaaccgcttccgcctgttcgcgcaggagatccgcgcactgcagccggaggagaacgaagacggcgccgaacactgccatatcgagatcctggtgcgcatggtcgacgagcacggcgatctgatcatgcccggtgccttcattcccgccgccgagcgctacgacctgatgggccacgtcgaccgctgggtcatccgcaacgtgctgcgcggctacggcgaacgcctgggcgccgtgcccgggctgtcggtatcgatcaacctgtccgccaactcgctcggcgagcccttcctgctgcccttcctgcatgcagagctggaggccagtgcgctgcccgccagccgcatccggctggagatcacggaaaccgcgctgatcaacaatatggccgcggccaaccggctggtgacggagatgcggcgcgccggctgcaccgtgtcgctggacgacttcggctcgggcctgtcgtcgtttgcctacctgaagcagttcccggtggacttcctgaagatcgacggcagcttcatccggcaactggccgacaacgcggtcgaccgcgagatcgtcagctcgatcaacgacatcgggcaccggctgggggtgcgcacggtggcggagtgggtggaggatgaacgcaccctcgatgcgctgcgcgcgatcggggtggactatgcgcaggggtatgtgatcgggcgtccggtggcgctggatgtgttccttgccggatgccggcagcgtgacgcgcaggcctcccaggccgccgggtcgtgattagatccggcgccagtcacgaggccagatgtccgccctccccggtgctccgcttccattgtgactaaaacgccgtattgaggctcatccgtcctacgggattacaccgattcatacatgcctgtatatacaggactatacatgcctatgcatcgccaaaaaaagcgagcgttcccgactgcacgaccgaaggagttcccgtgaccaagaccaccaccaaccccacgcgtttccgcgacaccgaaatccgcgccccccgcggcaccacgctgacggccaggagctggctcacggaagccccgctgcgcatgctgatgaacaacctcgaccccgaggtggcggagaacccgaaggaactggtggtctatggcggcatcggccgcgccgcccgcaactgggaatgctatgaccgcatcgtggaagcgctgacccgcctggaagacgaccagaccctgctggtgcagtcgggcaagcccgtgggcgtgttccgcacccatcgcgacgcgccgcgcgtgctgatcgccaactccaacctggtgccgcactgggccaactgggaacacttcaacgaactcgatgcaaagggcctggccatgtatggccagatgaccgccggcagctggatatatatcggcagccagggcatcgtgcagggcacctatgagaccttcgtcgaagccggccgccagcatttcggcggcaacctgaagggccgctgggtgctgaccgccggcctgggcggcatgggcggcgcgcagccgctggccgccacgctggccggcgcttgttcgctcaatatcgaatgccagcagagccgcatcgacttccgcctgaagacccgctatgtcgacgagcaggccaccgaccttgacgacgcactggcccgcatcgaccgctacacgtcgcagggcaaggcgatctcgatcgcgctgtgcgccaacgccgccgaggtgctgcccgagctggtgcgccgcggcgtgcgcccggacatggtcaccgaccagaccagcgcgcatgacccgctcaacggctacctgccggccggctggagctgggacgaataccgcgagcgcgcgcagcgcgagccggcggcggtggtcaaggccgccaaggcgtcgatggccgcgcatgtgcgcgccatgctggcgttccagcagatgggcgtgccgaccttcgactacggcaacaatatccgccagatggccaaggaagaaggcgtggccaatgccttcgacttccccggcttcgtgcccgcgtacatccgcccgctgttctgccgcggcatcggcccgttccgctgggccgcgctgtcgggcgacccgcaggacatctacaagaccgacgccaaggtcaaggaactgatccccgatgacgagcacctgcaccgctggctcgacatggcgcgcgagcgcatcagcttccagggcctgccggcgcggatctgctgggtgggcctgggcctgcgcgccaagctgggcctggccttcaacgagatggtgcgcagcggcgagctgtcggcgccggtcgtgatcgggcgcgaccacctggattcgggctcggtcgccagccccaaccgcgagaccgaggccatgcaggacggctccgacgccgtgtccgactggccgctgctgaacgcgctgctcaacaccgccagcggcgccacctgggtttcgctgcaccatggcggcggcgtgggcatgggcttctcgcagcattccggcgtagtgatcgtgtgcgacggcaccgatgaagccgccgcccgcatcgcccgcgtgctgcacaacgaccccgccaccggcgtgatgcgccatgccgacgccggctacgagatcgccgtcgactgcgcgcgcgagcagggcctggacctgccgatgctgaaccacgcatcgcgcgactgatcccgcggccagcaagagccgttctgccgccgggccgccgcgtgcgccccggccggcgccttatcgttttacggagacacccatgtccatcgacaccaccgccggcgtggcggtcgctgcgccccaggcgcaactgtcacgcacgcgcgccattgccgccattaccatcggcaatggcctggagttctatgatttcgtcgtctacagcttctttgccacgctgatcggccggctctactttccggtcgacaaccctaccgggcaactgctgatgtcgttcgccacctttggcgtcggcttcctgatgcgcccgctgggcggcctgctgatcggcatgtatgccgaccgcgccgggcgcaagccggcggtggcgctgaccttgtggctgatggggctgagctcgctgatcttcgtggtgacgccgccgtacgcgcagatcggcatcctcgcgccggtgctggtggtggtggcgcggctggtgcagggctttgccatcggcggcgagatgggcgcatcgaccgcgctgctgctggaatacgccgatgaccgcacgcgcggcttctataccgcatggcagccgttcagccagggcctggcggcgctgctgggcgcgatcaccggcctggtgctgagcaacgtgctggcgccggccgagctggaagcctggggctggcgcctcgccttcctgatcggcatcctggtgatcccggtcggcctggtgatccgccgccggctggaagaaaccgccgcgcccgtgcgccacggcgagcacgccgcgcaatggccgctgctgcgccgccatggccgcgagatcatcgccagcatcctgctgatgatcggcctggcctcttcgacctatatcgtcgtgtactacctcagcaactacgcggtcagcgtgctgaagatgccgctgtcgctgggcatctgggccgcgtgcgtggcggcgctggtgcaggtggcgctgtcgccgttcgcgggctggctggctgaccgcatcggccgcaagaccgtagtgctgtggtcgcgcgtggcgctgctggcaatggtctacccggccttcgtgctgatcaacgccgagccgtcgctcgcgcgcctgctggtggtggtgggctgcctgtcggtgccgatgtcgatgaccgcgccggcctcgatggtcctggtcagcgaggtgctgccgcagcggctgcgcgccactgggctgtcgatcgcgtattgcgtggcgatcgcgatcttcggcggctttgcgcagtatttttcgacccggctgatccaggtcaccggtgacgccaatgcgcccgcgctgtatgtgatcggctgtggcttggtatcgctgatcggcctggcaatggtgccggaaacgctgggacggcggctgaaatgagttccccggcgcctgcaaagggtgctccaaagccgcccgagctagcctaagcaaggtgttctccctctcccctcatggggagagggtggtttggccaggaaccacatcaagcaaggccctcgttttttccagccctgtgacgccggcaaaggccccaccttcccccgctgccagcacctcaaaaccccgggttaacacctagaacgccgttcggattcccgaacggcgttttcgcatgccggtccggattcccgaatccggcgccggaatcacatctttttctcctttatattcaacaagttgcacaactcctgcagccctttcgggctggcacggcgcgtgcaatataggccgccgcttacagcgccagacgggtatgccggcacgctgcccggcgtcccggccgatgccaaaaacaaaggaggacacacatgaccaaccccgccttgcccacccccttcgccactccggcgaacccacggcacctgttgccgcgctgaaccacgacaaggccggcctggcgccccgacatcgccgcccagccttcccgcaatacacagacgcccgtccctgccacaggggacggacgcacaggcctgatccacgatgaaactgaatcgactgcccaccctgatcttcattgcgatgctgctcggcgtgctggtcggcaccgccgcgcacaacatggcgccggacgccgccaccgccaaatcgattgcggaccacctgtccatcctgaccgatgtattcctgcggatgatcaagatgatcatcggcccgctggtgttcgccacgctggtggccggcatcgccagcatgggcgatggccgcgccgtgggccgcatcggcctgaaggcaatgatgtggttcattggcgcctcgatcacctcgctgctgctgggcctggtgatggccaacctgctggaacccggccacggcatgaacctgccgctgccgccggctgacgcggcctcgaacctgaagaccggcgcgctgaacctgcgcgacttcatcgcccacatgttccccaagagctttgtcgaggccatggcgcacaacgagatcctgcagatcgtggtgttctcgctgttcttcggctttgcgctgggcacggtcaaggacggcgtgggcaagcccgtgctgcaaggcatcgaaggcctcgccacggtgatgctgaaggtcaccaactacgtgatggcgtttgccccggttggcgtgttcggcgccatcgcggcggtgatcaccgcgcagggcctgggcgtgctggtcgtgtacgccaagctgattggcagcctgtacctggcgctggcgctgctgtgggtggcgctgatcgccggcggctacttcttcctgggccgtgacgtgttccgcctgctcaagcagatgcgcgcgccgctgatgatcggcttcgccaccgccagcagcgaatcggcctacccgaaagtgatcgaccagctgacccgtttcggcgtcaaggagcgcatcaccaacttcgtgctgccgctgggctactcgttcaacctggacggctcgatcatgtacacctcgtttgccgcgctgttcgtggcgcaggtgtatggcatcgagctgtcgctgacccagcagatcaccatgctgctggtcctgcttgtcaccagcaagggcatcgccggcgtgccgcgcgcctcgctggtggtggtcgccgccgtgctgccgatgttcggcctgccggaggccggcatcctgctggtgctgggcatcgaccacgtactcgacatgggtcgcaccgtgaccaatgtgctcggcaatgcgattgccaccgccgtcgtcgccaaaagcgaagacgccatcggcgcgccggtaccgtccgaggaggatgaacccgccgcggataccaccaccggcctggcacctgcccaggtcctcgcgggcaagtaataccgtccgccaggcgtgccagggcccggttgccgatacggcaaccgggcctttttgcattctggcgcggcaccgcccccctggtgtggtaaaagtaggcacccgcgccggccctgcccctctggtccgcgcggcggctttgccacctgcctcacccaacacctgatgaccggtccgctacaccctcccggcgataccacccgcgccaccgcacctgcgtccgccgcacccaccggctcgcgcctgccccacggcctgcgcggccttgcgccgctgctcgcgctgctggcgctggccatgctggtgggcctggcgggctcgctcggctaccgctacagctacgacaccgcgctggcgcgccaggccgaacgcggccaggtgcagttgcggctgtacacgcaggcactggaaagcgagctggcccactacgactacgtgcccggcctgctgtcgctggacgagcgcatcgccgcgctgctgctgcgcccggacgacgccgcccgcgcggcacgcgccaatgactacctgagcgccctcaatacgcgcgccggcacgcgcgtgatctatgtgctggatgcgcacggcaaggtgctggccagcagcaactggcagcgcccggacagctacctgggcgaagcgctgagtttccgcccgtacttccaggcggccatggacggccagttggggcgcttctacggcgtgggcaccacccgcagcgaatcgggctactacctgtcggcgccgctgggcgagcgcgacaacccggtcggcgtggcggtggtcaagattggcctggagccgctggagaaccgctggcagggcgccgacagccagatgctgctgaccgacgagaacggcgtggtgatcctggcctcggacccgtcgtggaagctggccgcactgcgccccctgtcacccgaggcgcgcgagcgcctgatgcgcagcctgcagtacaaccgcgccccgctgccgcaactgccgctgaccctggtgcgcaagctgaacaacggcaacggcagcagcagcgacgaactggtgcgcctgcgccgcggcccgccgatgctggcgcagcatgccgcgctgcccggcaccgactggcagctgacgctgctgaccaatacctcgcaggcacgcgtggccgcgctcaacacggcggcgctggccggcgtgctgagcgccttcgtgctgctgctgggggcggcgtggaacgtgcgccggcgcatcgtcaacgagcgcctggcggcgcgcgccgcgctggaggcggccaacagcgagctggagcgcaaggtggccgatcgcaccgccgacctgtccacctccaaccagcgcctgcaggccgaggtggccgaacgcatccgtgccgagaccgtgctgcgccaggcccaggacgggctgctgcaggccggcaagctggccgccgtggggcagatgtcgaccggcatcgcgcatgagctgaaccagccgctggcggcgctgcgcaccatctcaggcaataccggcaagttcctcgagcgcggcgactacgccaccgtgcgcgccaacctcgacaccatcatcgggctggtcgaacgcatgggccgcatcactggcgcgctcaagtcgtttgcacgcaagtccggcaacggccgccgccaggccaggctggccgaagcggtggacaacgcattgttcctgctgcagacgcgcgtggacgcggtccaacccgcgctgcagcgcgatgtcgatccgacgctggcggtggtgtgcgatcccaaccgcctggaacaggtactggtgaacctgctcggcaacgcgctcgatgccctcgccggccagcccgcgccgcgcattgcgctgcacgcgcacgtggcgggcgccatggtccacctgaccgtgcgcgacaatggcgccggcttgtccgaggaagccttcgcacgactgttcgagcccttcttcaccaccaagcccgccgggcaagggctggggctcggcctcacgctgtcggccggcatcctcaatgaaaacggcggcagcctgtccgccgccaaccacccggacggcggcgcctgcttcacgctggtgctgccgctggcgccgcacgacgccaacccacaggacgcaaagcatgccggctgacctgactgtactgatcgtcgaggacgatgccgacgtacgcctgggctgcgagcaggcgctgcgcctggagggcattgccacgcgtggcgtgggcagcgccgaggccgcgttgcgcgaggccgggccgggctatgccggcgtggtcgtcagcgacattcgcctgccgggccaggacggcatggcgctgctcgcgcaactgcgcgagcgcgaccccgcgctgccggtgatcatgatcaccggccatggcgacgtggggctggcggtgcaggcgatgaagcaaggcgcctacgacttcctggaaaagccgttctcgcccgagcagctggtggacgccacgcgccgcgcgctggagcaacgccggctcgcgctggaagtgtcagaactgcgagaacggctggcgggccgccagaagctggaagcccacctgatcggccattcgcccacggtcgagcggctgcgccgcctgatcgccgacctggccggcaccgacgccaatgtgctgatccacggcgagaccggcaccggcaaggaactggtggcgcgctgcctgcatgaggccagccagcgccacgcgcgcaactttgttgccatcaactgcggcggcctgccagaacagctgttcgagagcgagatcttcggccatgaagccggctcgttcaccggtgccgcgcgccgccgcatcggcaagatcgaacacgccgaaggcggcacgctgtttctcgacgagatcgagagcatgccgatgccgctgcagatcaagctgctgcgggtgctgcaggaacgcgtggtggaacggcttggctccaaccagccggtgccggtcaacacgcgcgtggtggccgccaccaaggccgacctgcgcgcgctctccgatgccggccagttccgcgccgacctgtattaccgcctgaacgtgatcacgctggaattgccgccgctgcgcgagcggcgcgaagacgtgccagctttgttcgagcatttcgtcgcgcaggccgcgttgcgcttcaaccgcgaggctgtgcccgcgaccccggccgagctggccgcgctggtagcctacccatggcccggcaatgtgcgcgagctgcgcaacctggccgagcgccatgtgctggggctgggctgcaaccccggccacggcaccaccgctcccgaagccctgccgctggcgcaggcagtcgagcaattcgagcgcgcactgattgccgatgccatgcgccgccacgacggcaacctgagccgcgccagcgaagccctgggcgtggcgaagaccacgctgttcgacaaggtgcgcaagtacgggctttgaagcgtggccggggaatcgggaacagtcgcgccggccatgccgcgcaatctgtcatgtcacgacagaactctgaagcgcccgctgtattcagcggatgcttcagagctgcgtcgaaccccggggaaccaccggggcaggacaatgtctccgttactgtcgtgcctgcctgcaagcaccaatgtgcgttaaacaaccaatacgcgatggatttatgttttttcttacagatggattggcgtttgcggcatattattggcttccagcagatccgagtctgagatcttcaatacgtccagaaagtcgctgatcggctggaaatgaaagaaacaacaaatttataaagaaagccgtccggccggcgggggagcgggtcaggacaaagggtcagtcaaccattggcagtgacaaccgcgcggcgcatgtgcctggcgccgcgggcgccgtcccggcgcgactgccttcaggaccacgggtgatgggatgaaactggatccggcactggctgaaaagccttattacagcacgcgtacagcggcaaaactgcttaacgtctctctgggcaccgtccagaagatggtcgagcgcggcgaacttggcgcctggaagaccaacggcggccatcggcgcatccacaaggagaccgtgcaccgcctgctggcgacgcgcatcgggccggaatcggcgtcgccgcacggcctggacctggtggtattccaccccaaccaccaggaagcgcagcgcatccacggccagcttgccaagtgggggctgccgctcaagagcgtggtggtcgacgatgtgctggacaccgtcatcacctcggtcagcgagcatccgcgcgtggtgctgtactacgtcgacgaactgaacgacgccgagtcggccaccatcgagaagctacaaaatttctttgccagccagcacgtgatcttcgccgtgatcaccaaccgccaggcctatgaaggcgtggccgatgccctgcagcactggggcatcatggtgttcctgaagacgccgtcgctggaagaggtcaagggcttcctgcgcgcccagctgatgatgggccgcaccgcctgagcacggctgcgccggggccatgccggccccggcatcgcttgcagcctcaggccactgccgcctgccgcggcgttgccagcccggcttcgtcgccgtcggcctgcgccatcatccagccgtacaggttgcgcggatccggcggcatcgccaccagctcaaccgccctgcccgcccggtgcgcctgcgctgcggtgtagagccagcgcagcgcggcgtagtcttccagcgcaaacccaaccgaatcgaacacggtcacctcgtccgccgccgcgcggccgggcgcgtggccggccagcacctgccacagctcggtcaccggcgcgtcggccggcaactgctggatctcgccttcgatgcgcgtctggtcttcgtattccaccacgatgcgcgcgcggcgcaggatatcggggtgcagttcagtcttgccggggcagtcgccgccaaccgcattaaggtgcatgccgggccgcaccatttccggcgtgaggatggtggcgcgagtcttgtcggcggtgaccgtggagacaatgtccgccccggccagcgcggcctcgatcgattcggcacgccggatcgaaagtccgggtacgccaccaaggttgcgcatcagccgtgtggtggcggcgggatcgatgtcataggcggcgatctcgcgcacgcccagcatcgcctggaaggccagcacctggaactcggcctgcgcgccgttgccgatcagcgccatcgtcgccgcaccgggccgcgccatggcgcgcgccgccagcgccgaggtggccgcggtgcgcagcgcagtggccagcgtcaggtcggccagcatcagcgggaagccggtttccacctcggccagcaggccgcaggccatcaccgtcggcatgccatgctgcgcattgcgcggatggccgttgacatacttgaacgcatactggatgccgtcgctgaccggcatcagctcgatcacgccacgcgcggaatggctcgccagccgcgcggacttgtcgaagtcgtgccagcgcagaaaggcctgccggacctgcccggccaggtccacgatggcggcctgcgggccgatggtggccaccagccgggccacgtcactggcgtccaggaacagggatcgggcggtgcttttcatgaccgtctccttggctgtctgtgcgatgcctgcactcaggccgccaccgcggcgatgcccggcccgctgcggcgatccaggcgcagcgtcatgcaataggcgccgccgccggacagcatgaagggcgacaggtcgacctcatgcagctggtagccgcgccggcccagctcggtgcgcaggtgcggcgtggtgcgggtcatcaccacctggtcgtcgagattgacggcattgacgctgaagtggcgcaggtcgtcggcgctggcctcgatgcgcagccgcgccggcacgcgcgcgcgcaattcgcgcaacgccgcttcgctgaaggccggcgggtagtacagcacctcgccgccggaaagcgggcagaagcagacgtccaggtggtagctctgctcggtggccagttccagcgccaccacgtccttgccgaagtagttcgacaccgccacggctgcctcatgcgacgagcgcggaccgaacccggcccagaagtggccgcggccggcatcccagatgcagtcgcccgcgccttcctggaagcagccctcgggcagcagcgcgacttcgtcgagcaggccgcgttcgcgcagcttgccgaagatgtcggcgaacggcgcttcttcaccacggcgttgcgggtagcgaaagcgcgccagcaacgcgcggccatcgagcaccaccgcggcgttggccgggaacaccatgtcgggcagccccggcgcgccgggggccacctcgaccgcaaagccggcccggcccagcgcctcgcgcagcgcgtcgaacgactgcatcgcgctgcggtgcatgccgcgcgggtcgcgtgcccaggcagccgggtccatccacggattgatgctgtacgacacgtcgtagaaggtcggctcgaccagcaggatcgtgggggagtgggtcacgggggctccatttttgatggcaggtttcgggaaatcaatcgctcgattgaattctcgggcaagctggtgttaactaatagccagcaaattgcgcaatttgcgcgaggcatttatcaaaatgccagcgtatgctggcgctttgaaaagactgtttgcccaccccatggatgccaccgaccaccagttgatttcactcctgcgcgacaacgcgcgcatgccggtcacggcgctggcgcaggcgctgcgcgtgtcgcgcgcgaccgtgcagaaccgcatcgacaaactggaacaggaaggggtgatcgttggctacacggtgcgcctgcggcccgaggccgaagcgcaccgcatccgcgcctggatgacgattgccgtggaaggcaacaaggcccgcaccgtgctgcaggcgctgcgcggcgagcccaatgtgcaagcgctgcataccaccaacggccgctgggacatcattgccgagctgcgcgccgacacactggaagcgttcgaccgcgcgctggaccggatccggctgatcgatggcatcagcgccaccgagaccagcatcctgctgtcgacctacaagtaaagggacccgcccaggtcccggcgcttcccaccaccggcaggcgcgccacgcccagtgccgccatgcgcttgtgcggtgcatcacgccccacgattgggatgcgctgcaccaaaggcggccaaatatatcaccccgtgatatattacgcgcaccattccaaagcgccccccgtcacaagaatgccaaccgcccccgctgtcgctgccctggcgcagaatgcccgtgcatggctgcgcacattcgttccgctacccgttgccgccagccgcaaggagcgcctcaaaagctgcctgggcgccctgctgggcctgctctgcactgaatggatcagccaccagaccttgggcggcttcaacccctggtttgtcgcgccgatgggggcctgcgcggtgctgctgttcgccgtgccatcatcgccgctggcacagccctggtcagtgattggcggcaacctgattgccgcggtggtcggcgtggcgtgcgcgcgctggatcccggaccctggcctggccgcagcggtcgcagtggccgtctccatcgccctgatgttccagttccactgcgtgcacccgcccagcggcgcggtggccatcaccgccgtattcggcgggccggcggtcagtgcgctgggcttcggcttcgttgccgtgcccgtgctgttcaattcgatgctgctgctgatgatggcgctggccttcaacaacctgtcgcggcggcgctacccgcaccgcccgcccgagcctgccatgcagcacgggaccaaggacgtgccgccatcccagcgcgttggcgtcacccgcgccgacctcgatgctgcgctgaaggtgcgcggcgaattcctggatatcgaagaagacgacctcgaacagatcctggtggccgcgcagttgcgcgcctaccggcgccacttcggcaacgtgctgtgcggcgagatcatgtcgcgcgacgtggtcatggtgaccccggaccagcctgcacatgaggccgggcacctgctgtcgcggcaccgtatcaaggccctgccggtagtggacgccacccggcggctggtaggcatcatcacccagagcgatttttttgcggcgcagcgtgataccggtgcgcggcggctggctggtaccgtgcgggacctgatgacacgcgccgttgtcaccgcccgacccgagcagccgatggtggagttggcccaggcattctcggacggcggcttgcaccacgcgccggtgatcgacgaccaccggcgcgtggtggggatggtgacgcagtcggatctggtggctgcactgctcaagagtggggtgatggcggtgccggattgagggcacccggacatcgcatcaacgcctttggctgcgccccgcgcaagcgcagaagaaaccgacgatgcactttgagcccgcgcagcagccgtaggcgtccccgcgatgccgctcgcagcaggcggcctgcgccctgcatggggatcgttcaatagtgggttaacgcaggcactgcccctgactcacatggcgtagcagggtcgaacgggcaaccacgccggaacggcaagcaccaccgtgcgaaccaccaacaccctggaattgattgccggccgctcaggcgacgcgttttttggttactttttgtcgctcggacaaaaagtgactcgccagctacgccggcgaaacagccacgccgaccaagcgccacataccgaccgctagcaaaaagcccagacacccacccgctatccaccgtcacaaacctatggcactgtgcccccacgagggggaacacgccgcacgcagcggcccaccgccatagtgacgactaacccaccgccccccttccgcatcgccccacccaacgtaagctatatttacgccgttcccgtcacaccgacgggaccaagggagatccatccatgagttccggccagttaattgagaagatcgcagccgtcttcgcactgatcgtgctgatcggcggctcgctgctggtgctcgcgccgttcaccaccgcgctgctgtggggcgcgatcctggccttcagctcgtggtacccctacacggtgctgtcgcgctggctgggcaaccggcgcagcctggcagcgttgatctgcgtgctgctggccaccgtggtggtgctgggtccgttcgtctacgccggcgccagcttctcggcgcacctggacgagctgtccgcgctggttgaccgctatagggaacacggcatcccgcagctgccggcctggctgagcagccttccctatgtcggctcctacctgcagaactcctggaacagcgtcatcaatgccgattccgagatggtcgccaacctgcgcaagctgatcgccccggttggccacatgctgctgggcgccgggctgtcgatcggcgccgggctgggccagctggcgctgtcgatcatcctggcgttcttcttctacaccggcggcgagcttgccattgcctggttgcgcgcgggcatgcaccgcatcgccggcgagcgcgccgaccacctgctggagctggccggcagcaccgtcaagggcgtggtctacggcgtgctgggcacggccttcatccaggccgttctggccggcatcggcctgtggatcgcgggcgtgccgggcgctgccatccttggcttcgtgaccttcttcctgtcggtgatcccggtcggcccgccgctggtgtggctgccggccgcgctgtggctgtaccacaccggcgccaccggctgggccatcttcctggtggtatggggcgtgggcgtggtcagcatggctgacaacatcgtcaagccgctgctgatcagcaagggcaccggcatgcctctgatctggatcatgctgggcgtgctcggcggcgcgctggcgttcggcttcctgggcgtgttcatcggcccgacgctgctggcagtggcctatgcgctgctgcgcgactggaccatcggctcgcaggcagaggtaaagcaagacctgaagcagagcgaggcactggcggccgcgccgccggcgccggccgtggtcgacaaccccgacgtcccgccggccacgaccggcaagcaccccggctgatggcaggacacgacgcgcccggcgcgcccgccaccccggacctctcgccggccatgctgcaccggctggtggcatgcgaatactgtgacgcggtctacgaacgcacgccgatctcgcccggcgagcgcgcgctgtgcctgcgctgcggcggccagctctaccgcgaaagccgccgccagtatcaacggctgctgccgctggtgatcaccgcgctgatcctgttcctggtctcaaacgcctacccgatcgtcgagatggacctgcagggggtccgcacccagaccacgctgctgggcgccgtgcaggccctgtacaccgacaagatggggctggtggcggcactggtgttcgccaccaccatcctttttcctctgtccgaaatgctgatgatggcctatctgctggtgccgatggcgcagcatcgcatgcccgccggtttcgaccgcatcgtgcgcggcatccgccagacccggccctggggcatgatcgaagtcttcatgatcggcgtgctggtcacgctggtgaagctgtccagcatggcgcgcgtgctgcccggcatcgcgctgtggtcgttcgcggcgctggtgatcgtgctggcggcgatgttgtcgttcgatccgcgcgacctgtggcgccatctggaaacacccgatgacaacgccgcggccgcgggcgaggaaggccgatgacggaacagccgcaaccgccgacgcagcgtccccgccagccaggcggccgcctggcccgcccgcgccagctggcgcgcgaggtggtggccgaactcaccgacgacgacgagcgcagcccgctgccgcaggtcccgaccgccagccggctgggcctgctgtcgtgccacgcctgcgacctggtcagcccgcgcacactggagggcgagccctgcccgcgctgcggcgccaccctgcaccatcgcaagcccgacagcctggcgcgcacctgggctttcctgctggccgcctttatcctctatattcccgccaacgtgctgccggtaatggtgacccagtccatcctcggcacgcagcaggacaccatcctgtccggcgtgatctacctgtggctgtccggctcgcacatgctggccgggctggtgctgatcgccagcatcatcgtgccgctgctgaagatggtgatcctcaccttcctgctgctgtccgtgcatttccgctcgacctggcggatccggcagcagacccggctgtacgggctggtggaggtgatcggccgctggtcgatgctcgatattttcgtggtggcgctgctggcctcgctggtgcgggccggggcgctggccaccatcatcccaggcggcggcgccatggccttcggcgcggtcgtggtcatgaccatgctggcctcgctcagcttcgatccgcgcctgctgtgggattcgctggaagacaacaatgcccgacactgacaaccaagcctccacaccctcgggttcgcccccgccggcaccaccgggcctgccgcggccagaacgccggcgccgcgcgcgctggctgccctcgctggtctggctgatcccgatcgtcgccgcggtggtcggcatctcgctgctggtgcatacgctgacctcgcgcgggccggagatcacggtcaccttccgcaccgccgagggcctgacgcccggcaagacggcggtgcgctacaaggacgtcgacatcgggctggtcaagtcggtgcggctggcacgcgaccgctcgcacgtggtggcgtcgatcgacctgaccaaggacgccgagaacttcgccgtggccgacacccgcttctgggtggtgcgcccgcgctttgcggccagcggcgtgtccgggctggagacgctgctgtcgggcgcctatatcggcgtggacgcgggcaagtcgaatgaatccgcgcgcgacttcaaggggctggaagtgccgccggtggtgaccaccgatgcctccggcaagcagttcgtgctgcgcgcctccgagctgggctcgctcgatatcggctcgccggtctactaccggcgcgtgctggtgggccaggtggtggcctaccagctcgaccccaatggacgcgacctcacgctgcgcgtgttcgtcaacaaaccctatgacaagctggttaccgccgacacacgcttctggcatgccagcggcgtggacctgaagctcgatgcgggcgggctcaagctgtcgacccagtcactggtgacggtgctgctgggcggcgtcgccttccaggcgccggaccacaccaccgccaccgacgccgcagccgagaacacgcagttcctgctggccaacgaccaggccgaggcgatgaaggagccggaagaactggcgcccacgctggcggtgctcaatttcgaccagtccgtgcgcgggctgtcgccgggtgcaccggtggatttccgcggtgtaatcgtgggccaggtgcgttcgatcggcatcgagtaccagcgcgacaagaaagcgttccgcatgcccgtggtggtggagctgtacccgtcgcgcatgggcttccgcgaacgcgatgtcgaagaccgcgagcgcgcgcgcaagatcatccaggggctgctgcagcgtggcatgcgcgcgcagctgcgcaccggcaacctgctcaccggccagctctacgtggcgctcgacttcttcccgaaggcgccgccggccaaggtcgacctggacgcgccgatcccggaattcgccaccacgcctggcaccttcgaccagctgcaggcgcaggtgggcgatatcgtcaaccgcatcgacaaggtgccgttcgaccagatcggccaggacctgcgaaccacggtggccagcctgaacaggacactggcaaccgccgacaagctggtgcagcagctcaacggcgacgttgcgccgcaggtgctggccgcgctgcaggatgcgcgcaagacgctgaccgcggccaacggcacgctggcctcggacgcgccgctgcagcaggacacgcgccgcatgctgcaggagatgacgcgcaccgccacgtcgctgcgcacgctgaccgattacctcgaacgccaccctgaagcgctgctgcgcggcaagccggagcaagaatgatgaagcgccttcctatcaccagcctcctcgccggcgcgctggccgcggccgtgctggccgggtgcgcctcgcccgagccgcgctactacacgctggcgcagggcgcggtcgcgccgctgccggccacgacgacgccggcatcgaccaacacgctatggctggaagtcgcgccagtgcgcgtgccggagcggctcaaccgcccgcaactggtggtgcgcgatggcggcgacgccggcctgcgcctgctggacctggcgcgctggtccgcgccgctgcccgacgagctgcgcgacgcgctgtcgcagcgcctgcaggccacgctgggcgcggtcgacacctaccagcaggggatgtccgacgtgcagccgctgtaccggatcaccacggaagtgctgcgcctggatgccgacgtgggccagcgtgccggcgccaccatcaactggaccgtgcggcggctgcctgacggcaaggtggtcagcggccgcacccaggcagagctgccggcgcccggcgcagtcgatggcgtcgtggcggcgtaccgcgagatcgtcgccaccacggcggccgatatcgcggccggggtgctgtcgctgcagcgctagtcgtcgccccacgcggccgcgtcgcgctcgcggcgcgcggccgcttcagccgcccgccggtgaatcgcctcggccatcgccgccaggcactcggccgccccaccctgcaccagcttcgccgcacacgccagcatcaggttcttgcccagcccgaaatcctccaccacgaagccgcgcgcatccagcggcgcaccatcctcgtcggtggccacggtgacgcgctcgcgcagcgtgcccgcatccgcgctgtaggcccagaccggcttctgcagcgccaccgcaaagcccacctcgaacgcggtgccggaatccggctcgcccggtccgcggaaatcgtcgaggttggccatcaccatgtcggcgcgccgcagcagcgcaagattggcgtcatagatccagcgcgcggtgtcggcgcccgacaggccatcgggcgcggatttgtcgagcggatacaggccgctgaagccgtgcgccgcgcacagcgacttgaggtgctcgccccaggcgcgcgcatccttgcgaaagacgtcgaagccagccaggtagatggttttcatggcacgtgaagtggggcaacagggatcaggatcgcagcataacccgccgcccgcgggcgcgataccaccggcctgcatgaacatcgcgcaacttgcgcgcgcacgctttgccagctccctgcgcatgaggggccccttgcgctaccattgcccgtcccctccttgcatcccgcatcccatgcctgctccccagatcctccaggtcggcccgctcgcgccgcggaccaatgccaccctgcagcaacactacggcgccgccgcgctgtggcagcaggccgatccgatcgcgtgggcgcgcagcgagggccagcaggtgcgcgtggtggtgacctcggcgcgccacggctgcagcgcggcgctgatcgatgcgctgccgcgcctggaagccatcgtcagcttcggcgtgggctatgacgcgatcgcgctggatgcggcccgcgcgcgcggcatccaggtcagcaacacacccgacgtgctcaacgactgcgttgccgacctggccttcgggctgctgctggacgcggcgcgcggcatcgcccatggcgaccgcttcgtgcgcgccgggcgctggccgcagggcagcttcccgctgaccacgcgcgtgtcgggcaagaagctcggcatcctcgggctgggccgcatcggcgagatcgtggcgcgccgcgcgcagggcttcgacatggagatcgcctacaacaaccgccgcccgcgcgagggcgcgccgtggcgcttcgagccggacctgaaggcgctggcgacatgggccgacttcctcgtggtggccaccgtcggcgggccgtcgacggccgggctggtatcgcgcgaggtcatcgacgccctcgggcccaggggcatcctggtcaatgtgtcgcgcggcagcgtgatcgacgaggcggcaatggtcgaggctctggttgacgggcgcctgggcggcgccggcctggatgtgttccaggacgagcccaacgtgccgcccgcactgatggcactggacaatgtcgtgctggcgccgcacatggccagcggcacgcatgaaacgcgcgccgccatgaccgcgctgacgctgcagaacctggatgcattcctggctgacggcagagtgctgacgccagtgctgtagacggctaccgccgtgcctatactggatgcaccggctccagcccactctgcgggccggcgtcaggaggcatcatggcacgcaagtttatcgattgccgcgagttcccgagcgacacccactgcacggtggcaatgagcgccgacagcgaagacgaactgctcgaagccgcggtccagcacgcggtagcggtgcaccagcatcaggacacccctgagttgcgcacccagttgaagtcattgttcaaggatggcatgccgccggcgtgaaaccggcacggctggcgcccgggggcgccggctcccaccactggggctcattcgcagtccctgatacagcacttaagccacgtcgaatacccatgacggccgtcatggcgcatcattgacgtagcgctatatacagacgtatattgcgcgtgacagtccacccgcacaggccttgccacacgtgccggctggccgattcccgaggattccgatgtctgccctccgttcctgccgccgcgggttcctgctggccgcttgcgtcgccacgctggcgctggccgcgccgcctgcctttgccgccgacctggtggtgtccgcggcatccagcctgaccaatgccttcaagtcgctggccgagtcgttcgagcgcgcccatcccggcacgcacgtggtgctgaacttcggcgcgtccgacgtgctgatgcagcagatcatcaagggcgcgccggccgacgtgtttgcctcggccgaccaggaggcaatgaacaaggccgaggccgagaaggtgatcgcgccggcctcgcgccgcaacttcgccgccaaccaggtggtgctgatcgtgcccgcggacagcaagctggccatcgcctcgctgcaggacctgacccgcccggaagtgaagcgcatcgcctacggcaacccggcctcggtgccggtgggccgctacacccgcggcgcgctggaagcggccgggctgtgggacgccgtggccgccaagggcgtgccggcgcagaacgtgcgccagagcctggactacgtcgcgcgcggcgaagtccaggccggcttcgtctttgccaccgacgccgcggtgatgccggacaaggtcaaggtggccgtgcgcgtgccaagccgcacgccggtgacctaccccatcgccatcaccggccagacgcgccagcagaaggaagcggcgcagttcgtcgactacgtcgcctcgccggaaggccaggccatcctgtcgcgtttcggcttccagaagccctgacggaacgctgcgcgcaccatggacgccgtctgggtaccgctgctgctgtcgctgaaggtggccggctgggccaccgcgctgaatgccgtgctcggcgtcggcgcggcctgggcgctggcgcgctggcgctcgccgctgcgtgacgtggtcgatgcggtgctgacgctgccgctggtgctgccgcccacggtgctcggctattacctgctggtgctggtcgggcgccgtggcgtcttcggtgagtggctggcgcgcctgggcatcgaactggtcttcacctggcagggcgcggtgctggcctccaccatcgtcgccttcccgctggtgctcaagtcagcgcgcgccgcctttgaaggcgtggaccatcagctggaaaacgccgcccgcgtgctgggcgtgcccgaagccggcatcttcttccgcgtcacgctgccgctggccgcgcgcggcatcatcgccggcgtgctgctggcctttgcccgcgcgctgggcgaattcggcgccacgctgatgatcgccggcaacctgcccggacgcacgcaaacgctgtcagtcgccatctatgaggcggtgcaggccggcgacgacaacaccgccaacctgctggtgctggtgacctccgtcacctgcgtgctgctgctggtggtcgccgggcgcctggtgccggccgccgcgcgcaatcccgctgaactctatgaacgccggcgcctgcgcccgcgcatccgctaagccgggacccgccatgagcatgcacgtcagcatccgcaagcagatggtctcggccgaccgccactttgcactggatatcgatttcgattcggccagccggcgcattgcgctattcggaccctcgggcgccggcaagagcctgacgctgcgcgccatcgccggcctgctggcaccggacagcggccgcatcgtgctgaacggccgcacgctgttcgatgccgacgccggcatcgacgtgcgcccgcaagagcgccgggtggcctacctgttccaggaatacgcgctgttcccgcacctgaccgtgggccagaacatcgctttcggcctgtcgcgcggctggcgcaacccgcgccgcggcgccgtgcatccggaagcgcagcgctggatcgacgccttcggcctggccgacatcgtcggcaactacccggcggagatctccggcggccagaagcagcgcgtggcactggcgcgcgcgctggtggcgcagcccgacatcgtcttgctggatgaacccttctccgcgctcgaccccgcgctgcgcgcgcgcatgcgcgcggagttgcgcacgctgcaggccagcctggatgtgccgatgctggtgatctcgcacgatcccgccgatgtcgaggcgctgggcgaccacgtgctggaaatccgcgagggccgcatcttcggcagcggcaccagccgccaccatccgccggtctacgcgccggtgtcggcgcacgtggcctgagccgcgcgcagcaggtcgacgtaagcgccttcaatcaggttggacgcgggaatgcccagccgcgccagcaatgcgtgggcttcggccacgccgttctccaggcgctcgtcttcggccagcaccacttccaattccaggaaatcgccaaggtcctcgacccggtccaggtgcacgcgcgtgcggccagccaggtacagcgtgcgcagcttgcgcacccgcccgccctcgccatgcgccgcggccagcgccgcgcgcagggtatccggcgatcgcgtcggcgacaggatatagaagctctccttcggccccgcctcgtcggcacgcgcatagaagatcagctcgccgcggtcgggcgcaatctcgcgcagcttgagccggccgttgacacaggggaagaaggtatcgtcctggcggatgtattcgggaccgctgtcggccagcgctgccgcatgcggcaacacggcttcgatactgtcaatgcgggccttgatctcgacgtttcctggcatgcgtctgtctccttgcaatcagcccagcagcagccgcgcggcaatcacccacatggtgatgccgatcaccacttccagcacctgccacgcacgcgaccgcgcaaacaccggccgcagcagcgccgcgccatagcccagcgaaaagaagaacaggaacgacgcggtcatggcacccgcggcgaactcgcgcgcgttccctgcgaactgcgtcgacaccgaaccgatcagcatcaccgtatcgagatacacatgtggattgagccaggtgaacgccaggcacaccgccagcgcggccccaagcggccgcggcgcggcgtcgctgggatccagcaccgcgttcgagcgccacgcggccaggaagctgcgcgcgccataccagatcaggaaagccgcgccgccgtagcgcatcgccgcacccagccagggcagctcgcggatcatcacggcaaagccggaaacgcccagcaggatcagcagcgcatcggaaagcgcgcacaccaggcagacccagaacacatgctcgcgccgcaacccttgtcgcagcacgaaagcattctgggaaccgatggcaagaatcagggaaagaccgagggagaagccggccagggcggcgtgcattggatgtggaacggctgtttttttgggtggctattattgcacgccgggggcagccgccatgcccgcccatcttcccattcctgccgcaggactacctcacgccactacacccaggatcacgcttgacgccttgaacaccgccagcgcagccacccccacctgcagccccagcgcttccacactgccattggtcacgatcgccgcaaccgtaccgccgccgtcgagttcgatcaccacctcggcattcaccgcacccggcatcacgcgcgacaccacgcccggcagctggttgcgcgccgacagccgcatccccggatcgggcagccccaccagcaccgaagatgccttgatcagcgcaaacgcctccgcgccctcggccagggccagcgtctcgacgctttcatgcgtgatggtggcaacgatctgctgcccgccgggcagttccagcacgacctcgtcattgaccgcgccgccgcgcacgctggccacgcgcccgaacagcttgttgcgtgcactggtcttgatcatcattcgcctcatcaggtggatatcgtcggccgccccctcgcccaagagcgacagctgtgcgacaaagcgctggtgttcgccttccagcgcacgataggtgcggatcagttgctcgccgcgcgcggtcaggtgcgtgccgccgccgcccttgccaccggcggcgcgcaccaccagcggctcgcccgcgctgttgttcatggcatcgatggcgtcccacgcggccttgtagctgatgccgaccgcgcgcgcggctgcggtgatcgagccgtgttcgccgatggcggcgagcagcgcgatgcggtccttgccgccccagtcttgcgagccggagcggaaccagatggctccctgaagttcaagcatggatgtcgggtgccggtggccggcaccgcaatggagtccgagacgcggctatggtaatccgaattgcggatcggtccggcgcactcagtcctggtgcgcggcctcatcccccttggctgagtcggcaacctcgcgcggatgacccgtccccatcacttcggcgacttcgcgatagcgccccagccgctcgcctgacagcgggccgccgaccgtcatcacgcgatgcgccgccaccatcagcttgcggcgggtctcgcggtccggcaccagtgccggcagcgcccggatcgcgcgctgcggatccagcctgacgataaagctctgctggcgcaccgcggtcttgaacgcggccaggtcggcctggccgccggattgcccggtggcttgctgctgttcgcgcgcgatgcgacgcagcaggttgaacggccgctcctcgatggcgctggggcgatcggcaacgtaggccagcacgcgcacaaaggcctccagcgtgccaccctgcccgatcgccgcctcggcatcatgcagccggcgcgcggccagctccttgcgcagcgccacagtcacgggcgactccaggttgaccggcgccggcgcgcgcagccccaccagcgccgccatcgccggcgaagcgtagatcgcctcgaaggcccgctcgtaccaggcatcgcgcaggtcgcggaactggtcgagcgcgctgacgatctgcgccgaggccgcgtgctccagcgtcagcagcggattgtccgccgataccggcgcgcgatgctcgcgcaccagcggcgccagcgcgccgatccacgccatccatgggttcacgtcggtcgccagctcgcgctccagccgcgcgggacgcagcgcgcgcagccactgcgcgctcaattcgttggacatggcgcgtacccacggcgaggcgaaggtgtcgtagatatgctggttgacctcggccacgcgccgcaccacctcgaaggcgcgctcgtcgtcgcggccgtcgtccagcgccaggatgtcggcaatgccgcggcgctcgaagcgcatcaggtagcgcccttcgaccaggtcgcggtgccgcaggtcgggcgcgacgtcttcgatcttcgcctcgtacaggcccggcggcagcacgtcgatcaggtccagtgcgcagaacagttcgctgtgctcgcggttggccacgcccgcggagacaaaaatgccgaggtggcccacggtcgggtgcaggcagtagacgatcacctggtcgttggcgaccagttcctcatcgctcgcgtacaggtccgggatccagttcagcgcctgctgcggcggcgtaatgttgtccccccaggaggcaaagatgatcaccggcgagcgcacgttgcgcaggtccaccacggtcttgccgtcggtgctgcgcacctcgcccgcggtgagccggttgccgacgaacagcttctgcacgatccagtcgatctcggcgcggttcatcaggaagtggccaccccaccagcgctcgaagtcgaggaagcgcgggccttcggtgtcggccttcgcatagacgtcgtagagcttctcccacagtgtattggcgggattgagctgttcgaagttctccaccagccaggcgccgtcgaagcggccattgcccaggtcagcaatcagcgaggccagccacgaaccgcccagcaggccgccgctgtagcgcatcgggttgcgcccgcgcacgccggaccagtacgccagcggcgcgccggccagcagcaacgggccggtgcgctccggcgccaccgcggccagcatcatcagcgcccagccggcctggcagttgccgatgatgaagggcttgcccggtgcatccgggtggcgctcgccaacgatctgcaggaaggcagcctcggcgcgcgccaccgattcgatggtctggcccgggcagggctcgtagaagaaggtgatgaaatagcacggatgaccggtgcgcagcgcgatgccgatctcgctgtcggccttgaaaccgccgatgcccgggccgtggcctgcgcgcgggtcgatcaccacgaaggggcgcagggcgggatcggtcgggctgtccgccggcggcacgatgcgcagcagcgcgtagttggcgggttcaggcagctggcggccatcggccagcagttcgtgctcgaacaccagcacgggcggcatgccctcaagctcatgctcggcggactcgttgccgcgctggcgcaggatgtcgagcagcagcacggtgcgctgccaggcgtccagggcgtattccagcgccggctgtgccagtgccgcgaacgggttggcgtgcgcggacagactggtagcggtcgaggtggcgctgctgtcccgcggcaggtcggcgcgttcgcgtgcggtcattccactcccctggttggcgccccgtccggcgtatccgcgcgcttggcggcgcggccgaagtgacgcatgttgctttgcaacaaaaccaagcgtaccagccgctgccctgcggtgcaacccagagactggttgcgcgcaatgccacactgttagcgcgccgcgcggtcatcgactggaaagaatcgtcgcctatactggcgcagggcactttgcgcaccgcagcaatcgcgcacccgcgcgcggccggcgggctgcgcaccgggcggcgcctgtcgcaagggaagcgggcaatatgctggccaagcagctgaccttcctggccggcgccgaagccgccggcatcgtgctgggcgcgcgcgttcccatcatcctcaccagccgggccgacagtgtgcgcgcgcatcggcagctgcgccattgccgtgctgctggcccatgcgcgccgcagcgccgcagccgcggcgcaggtctgagccatgcccgtgcagcccttgcgcaaccacttgggagtccatccagcgtgcccgccatccaccccgccgtgcatcccgtcatcctcgttgtcaacgccggctcatccagcgtcaaggtctcggtctacgccgtgcccgacgccgcgcatggcaatgccgacatcaacccggtgctgagcgcgcacggccagatcgagggcatcggcgtggcgccgcgcctgaccgcgcgcatggtcgacgggcgcgtggtcgccgacgagaccttcccgcaggcccaggtggccgaccacgacgccgccttccgcctggtgcggctggtactgagcgtgggcctgcgcgacaacccgccggtggcgatcggccatcgcgtggtgcatggcggtgccgactatgcgcaggccgtgcgcatcgacgacgaggtgatcgcaaagctggaagcgctggtgccgctggcaccgctgcaccagccgcacaacctgactgcaatccgcgcggtgcgcgaggctgtgccggacctgctgcaggtggcctgcttcgacaccgccttccatgccggccacgacgtgctggcgcagctgatggcgctgccctacgcgtactacgagcgcggcatccggcgctatggcttccacgggctgtcgtacgagtacatcgcgcgccggctgcgccaggtcgcgcccgacctggccgagggccgcgtgatcgtggcccacctgggcaacggcgccagcctgtgcgccatgcgcgacggccgcagcgtggaaagcaccatgggcctgaccgcgctcgacggcctgcccatgggcacgcgctgcggctcggtcgatcccggcgcgctgctgtggctggcgcagcagggcatgaagccggccgagatccagacgatgctgtaccaggaatccgggctgaagggactgtcaggcgtgagcagcgacatgcgcgcgctgctggccagcgatgcgccgcgcgcgcggctggcgctggacttctacgcctaccgcgccgcgcaggagatcggcaagctcgccaccacgctgggcgaccttgacgcgctggtgttcaccgcgggcatcggcgccaactcgccgccggtgcgcgcacgcatctgcgaacacctggcggggctgttcggcatcgcgctcgacggtggcgccaacggcgagaacagccagcgcgtcagccgcgacgacagccgcgtgccggtgctggtgctgccgaccgatgaagaagggatgattgcgctgaacaccgcccgcatcctgcgcgaatgcgggcagctctgagtcagcctgccaggtagtgcccgcgcagctgcgcgacgtccacttcgagcgcgtcgcgcaggtagttgtcgacgctgccccagcccgcgtcgatggcccgcatcgacgcatcgagatagctggcgcggacttccagcagcggcgtcatcaccgcgggggccacgccaagcccggccatgcgcgccagcgcagtctggttgaactgcgcattgcgctggttcgactccaggtagttggccaggatatcgtcctgcgccacgcccagcgccgccagcaacagcagtgcggcaaagccggtgcggtccttgccggcggtgcagtggaacagcagcgtcttgccgccttgcgcggtacgcatgaagccggcaaaggcctcgcggtagcgcaccgggaagtcgccgtagacctccagcatgaaggcatccatctgtgccggcgtgctggcgcgcaggcgcggcatcagcacatccatcgccatgctgccctccagcaccggcgccgccacccagtggaagcgctggccgaaggcggcctcttcaggcgacttctcgccgggcgaacggaaatccaccaccatgtcgagcccgagcgtctgcagccgctccaggtccgccgcgctggccagcgcggggttgccgctgcggtacaggcgcccctggcgcacgcggcgtccgcccgcgccggccaggccgcccaggtcgcgcgcattgctgatggtgtcgaatgccaggtcatgccggccctgcacgctggccgcggccggagcctgcggcacgacggcatgggcggacaggcatcctgcgcgttgaagccacttgatcattgttctttcctgattgtccttgcgatgcaggccgatgctgtgccggcgcttcagcgcgcgcggtacgccggcacatgccagcgcaggtggcagccggcgatatagcgccggtccagccgcgccaccagcttccacaccgtcagcgcactggcatcgatatcgacccacgcccacgggtgcttcgggtcgcccgcttccaccagttccaccgaacggatcttcgcataccgcgccagcgcctcgcgcagtgccgccgcgtccaggcctgctttcagtccacgtactaaaaccttcatggtcggctccaattatttcagatcactcccgctcatgcatcacccggccggggccatggtggcgcgcttgcgcacacaccgccgccagaccttatgtggcgagcttctcactggtatgacgcctgcggcggcgcgggtatccattgatcacacgtggacttgatcttgctcatggcgggcggaaatagcttggaatcgccctcgacagggccggctgccggtcggaaaattcctatcatgtcgaacgcggcggccacgccagcagcgaggccgctccgggcacaccgcacacggatgccgtctcgcgaccgacacctgcctgtcctgccggccgcgctgtgccagcgccggcgcgccgcactgtctgccgagagccgtccgagccaggtgcacccgggtaccgagcaggatcaccaaccaaaaggatgccggcaatgacagatacttccgcctcccccccttccgccccttccgccccttccgccccttccgccgcggctgcacaggctgtcgtgccggcgccgaaactcacgctgcactggggcctgttcgccgccgttgctgcgctgctggtggtgctggcgatcccgcagcccgaggggctgaccgtcgccggccagcgcatgctggcgatcctcgccttcgccatcgtggtgtggatcaccgaggcggtgtcatatgagaccagcgccatcatgatcacctcgctgatggcggggctgatcggctttgcgccgaccgtcaacgacccctcggtgcagtacggcacctcgaaggcgctcggcatggcgctggcggggttctccaacaccgcgctggcactggtcgccgcggcgctgttcatctccgcggcgatgaccgtgaccgggctggaccggcgcatcgcgctggtgacgctgtctgccattggcaccagcacgcgccgcatcctgatcggcacgatcgccgtcaccatcgcgctgagcctggtggtgcccagcgccaccgcgcgcagtgcctgcgtggtgccgatcatgatgggcgtgattgcagcgttcggcgtcgacaagaagtccaacatcgccgccggcatcatgatcacggtggcgcaggccaccagcatctggaacgtcggcatccagaccgccgcggcgcagaacctgctgacggtgggcttcatggacaagctgctgggcgagcgcatcacctggctgcaatggctgatcgcgggcgcgccatgggccatcgcaatgtcggtggtgctgtatttcctggtgcgcttgctgctgcccgccgaaaccgacgccatccccggcggcaaggaagccgtgcagcgcgagctgtcggccctcggccccatgagcgcgccgcagaagcggctggccgcggtatcgctgggcctgctgctgttctgggccaccgaaggcaagctgcacagcttcgataccgccaccgtgaccttcgtcggcctggtgatcctgatgatgccgcgcatcggcgtgatggactggaagaccatgcagcaacgcacgccgtggggcacgctgatcgtgttcggcgtcggcatcagcctgggcacggcgctgctgtccaccaacgccggccagtggctggggcagttcgtggtcacgcattccggactggcggcgcacggcgcgctgctggtgtttgcgatcctgtcggccttcctgatcctgatccacctgggctttgccagcgccaccgcgctgaccgcggcactgctgccgatcctgatcgcggtgctgcagacactgcccggcgacatcaaccgcgtgggcatgaccatgctgctgggctttaccgtcagcttcggctttatcctgccgatcaacgcgccgcagaacatggtgtgcctgggcacggaaaccttcaacggccgccagttcgcgcgcatcggcatccccgtgacgatcatcggctacgccatgatgctgctgttcgcagccacctactggcgctggctgggctgggtctgaggaggtacgaaccatgaagatctccctcaccagcgcccgccagcttgcccgcgacatcctcgccgcgcagcaggtgcccgccgacatcgctgacgacgtggccgagcacctggtcgaatccgaccgctgcggctatatcagccacggcctgtcgatcctgcccaactaccgcaccgccctcgacggccacagcgtcaacccgcaaggccgcgccaaatgcgtgctggaccagggcacgctgatggtgttcgacggcgacggcggcttcggccagcacgtgggcaagtccgtgatgcaagcagcgatcgagcgcgtgcgccagcatggccactgcatcgtcactctgcgccgctcgcaccatctcggccgcatgggccactacggcgagatggcggccgccgccggctttgtgctgctgagcttcaccaacgtgatcaaccgcgcgccggtggtggcgccgttcggcggccgcgtggcgcggctcaccaccaacccgctgtgtttcgccggcccgatgcccaacgggcggccgcctctggtggtggacatcgccaccagcgcgattgccatcaacaaggcccgtgtgctggccgagaaaggcgagccggcgcccgaaggcagcatcatcggcgccgacggcaaccccaccaccgacgcgtcaaccatgttcggcgaacaccccggcgcgctgctgccctttggcggccacaagggctacgcactgggcgttgtggccgagctgctggcgggcgtgctgtccggcggcggtaccatccagccagacaatccgcgcggcggcgtggccaccaacaacctgttcgcggtgctgctcaatcccgcgctggacctgggcctggactggcagagcgccgaggtcgaggcgttcgtgcgctacctgcacgacacaccgccggcgccgggcgtcgaccgcgtgcagtaccccggcgagtacgaggccgccaaccgggcgcaggccagcgacacgctaaacatcaacccggccatctggcgcaatcttgagcgcctggcgcagtcgctcaacgtggccgtccccacggcctgaaggttccgcctgcggcgggactcgcaccctgccgcacacggctggcacaatacgtgccatgaaaagactctggtccgccttcatcaagctgctggtgctcgccgtgatcggcggcgcgctgctggctgccatcgccatcctggccgccaaccggcagctgccgtcgctcgacgccctcaccgccttccgccatacgcccgactacgtgcccatcggcaagatcccgcgcgagctgaccggcgccgtggtggcgatcgaggatgagcgcttctacgtgcatgacggcatcgactacatcggcgtcgtccgtgccggcgttgccaacctgtcggacgagctgtcgcagggggcatcgaccatcaccatgcaggtggcacgcaatttctacctgtcgcgggacaagacctatacccgcaagctgtacgaggtgctgctttcataccggattgaaaaggcgctgaccaaggacgagatcctggagttgtacatgaacaagatctacctgggccagggggcgtacggctttgccgatgcggcgcggacttactttggcaagcggctggatcagttgacgctggctgagtgtgcgatgcttgccgggctccccaaggcgccgtcggctaataatccggtggcgaatccgaggcgggcgcggcagcggcaggtttatatcctgcagcggatgctggagcttggacggatctcgcgaggagagtatgacggggcattgctggagccgttgaggctgaggtaagccgtcggtaatggcgctggcagaaaattcccccctggaggaaggatcagagtccggccacgattcggcgaatggaagcaacgccgtcaatctcgatagcgcagtgggcagcggactgccaaacgctgccaaggctgccatcgcgcaataggcccgggggccagtcgtctcgcgttgactttggcccgataacgccgtcgcctgaagcgccaggccgggatgggccagccgcctgagcgaacgctgggcacgctcacgccagcctggccgatggcgggcccagagggcatcgaccgccgcggccaggccggtgcggtccgccgtgtgtgtgtggccgtgcacgatttgcaccaaatcggtaagccactgtgcgggcgcggcaaggatatgaccggcccattgcgcgctcgcggcctgccagaccaccagcggatagcggcgcccaacccggtcatgcgatgcagccaagacaccgagcaggtagctgctttcgctgggaaactgcaggccgcacggccgcaggatgaagaggcatggtccagacgggcgcaagcgggactgaaccgagagactgggcggggtcaggtgcagccaatgccggacgccgccgcccgcggaatgcgacgccgccctcgccaggagttcgtcgtcccgatgatcgaaccagctccgccacgcctgcacctggtccagcggcgcattgtggcgaacaaagtctcccagcgctggcagcttgccgaaaatcgacggcgccgtgatcacccggatctcccgggacactggaagccctgcagcagcccggtggtccaggggttggcgaggctgccggtattgatatcgagcttcgccctgcggccgtcgaagtcatattcggccatgaagtggctggcgctagcggagccggcgagcctgcccttggcaatcacccgcatcagggcccacgggccgttggcggccagcgtcgaggtatccggacgaatccgggggctggcagtgatctcggccccttgcccgccccgcggtcccggccaggtcaccttgagcgggatgaccggaccgtgcacgtaacgctggctctgtccgtcgaagtccatgttcagctcgacgatttcgggatcgagttccaccaccttcaggtcgaccttccaggccatcttcttcgctcccggatcccggaagaacacttcccggatttccctggcgcgctggaacggcaccagactcgggccagccacgggcggcacgtcgggggcggtcagcttgtagcgccaaggcgagatggtggtatccacgtgcggcgccaacaccttctggaaaaagtcgtccaacactccgcccgcggcgaagacgcgtgcaaagtcttccgggtccacgtcctgcatcgacgtcggcgtgaacggatacttgccgtcgatggcgccgcggcagctctcgccgatgacggcgtccatctgcgcaatcaggatatcgccaacacccttgttgacgtccctggcgccctgcacgaccaggtcggtcagcaccgccttgaagggcgccggcagcttcgccgcctccatgcgcaactgctcgcctgcatccgcgggcggcggcaggttccgggtgctcagcgcgttattggccactaccagactggtgtagtaagcattgacgatgccggcaatcgtatccagttgcggcttgccggcggtgtcccgcgcgcctggcgccgccgcgtcggcctggccggtaaccacttcgcgcagcgcggcgaagcggttatcgaccagctcgcgttcctgacgggcctcggcacgcacgctcagtgcgctggctttgtcggccttcttgtccagcgctgacaacgccttctccgcaagggacttttcctcgggctcgagcgtgcggctgagcgtcgtttcttgcaccgcggccctgcccagccgggcaagcggtgaatccggcgcggcaaagttgcgcaggatctccaggtcaaaggccaggttgcttcccgtcacggtccggatgtcacccagaaacttctcccagttccgggcatattcgctcaggtaaaggcgccggatctcgcgcgtgagcggatcattgcccgtgagccggccgacggcattgtcagccgtttttttttgagcgccaggccctgttccacgccccatcacccaaatgtcgaccgcctgcgccctggcgacaaactccggcaaacggacattgaacaggtcgtggtagccggcataggtaaaaagccccggaataccgcgctccagcggctcgccgctggcccgggtaaagaccgtgccggcctggggaccgaccgcgcgcaccagcgtgaaatcctgcggtgcctcttccatcatggccgccttggcgcggtcatacaggcgttcgaccgaggtatcgctgtccaggaaatcgcgcgccgagcggatcagtgcctcgttctttgcgtagggcgacaagaccggccggctgccatcgagcaggctgtccagatgctccagcaccgccacgcggccaccaaaggcatccgccccgttgcccgtcgcccagtcgctgcgcacccagctacgcacgtcggatgcgttgaacttgtccttgtcatgcagcatcaggtagacccgcagcgtgtcgtaggcctgcttggcgtcgcgctgactgaccgccgttgacagcaccgcttcgacccggcgcaccaggtacggcaccagcaggttgtcctgcaacctggtatgggtcaaggtcgcggcgcccagcaccggcaccacgctgtacaggccatagcgccaatcagcagaaggattgaccagatccaggccggcgtaggcaggcaggtcgcgggccgctcccaacacctccggcatcgcatcaggctgcggcttcttgtaaaacgccgttaccgtggcggccagcgccttggctttctcctgcaccaccgccagatagctgcgattgtcgccaaagctcgtatagagcgctccggctagccacagggaaatgaccagcaccagcgcatggccaaacaggcgcaacaggcggaagcggaactcccagcgcaggttcggcttcaccaggtgcgcctcgggcacgatgatgcgcttgaagacgtcctgcaggaagtagctgcggttgccggttgacttttccgcgacggcggcgtcctgggcgccagacttcccgttgccacgcacccgccggatcacggtgctcgcatccgcgacgatcgcttccccggtttgcgccgcactggtgaaatacacgccgcgcaacatggaattccgctcggtgtcgtcatagcgcgagtcaaggaatacctgctccagcatcgcgacaagcggctccgtcacgctcgcgaactcgtcgctcagcgcgtagagcgcccggcgtcgggccagatcgaactcctcatacagccgtccgacctgcccggcttccagccgctccaccagcgcccacatctcctcacggcactgcgcaacaacatcgattgctggctgtccccgccgccgctttcccgcaaccggaaaggtgaaccccaaaggctgggcacggccttcgctggtcaggtactggcaatagtccgtgaagccggcaagctgatcgaccttggtcaccagcacgtagacaggaaactggatgcccagttcctcgcgcagttcggccaggcgcgcccgaatcctggccgcttcgatcacccgctcctctttggagtgccaaagcaggtcctccacgctgatcgtcaccagcgcgccgttgatcggggcgcgggcgcgatattttcgcagcaggccgaggaatcccttccattctgccgggtcgatcgccgaacccgcttcctgcgccgtatagcggcctgccgtgtcgatcagaaccgcctcattggtgaaccaccaatctgcctgctcggtgccatcccgtgcgcgagccgccgcactcatctgacccgcgatagggaattgcagtccggcgttcagcaacgccgtcgtcttgccggcccccggcacgccaaccatcatgtaccagggcagttcatagaggtagcggcggccttcgaacaggcgaccgacccggctgccgctacgcatgcccttgagttgtcgcagggcagtctgaaccgccgtgttcagcctggcgatttcatccttggccacaacctcctcgcgcttcccgccaaagttcagcaggctctcgacaaaagtcttgtccgtgcgtgcgcgctgccaaagcaggtacaacacatagccgacgaacacgagcacaatcgccgcgatcagcagaatgcggactgagctcggctccagcggatggctggcgccaatcgcaagcaacggccccgcatgccagatcagcagacacagcgcggcgaggcctgtcgtggagaccggccagccaagcaaccagaacagcgtcgttgccagcaacagcaccatgagcgtgacgcgcgcgccgatgcccgccagcggatgcatgctactgaacccgagcagcggcccgatgaaccagatagctgccgcgaccatgagcacggcaatgagcgcgagcgtctgccgggagaacagcacagcgccgatacgtttcagaaattccatgcctgaccccgattacggcgttacaacgatttcgacccggcgattccttgcccgggcggctggcgtcttgttgtcggtaagcggctccgaatcgcccttgccaatcgcttcgagccgattctttgcgacgcccttgctggccaggtactctgtcacggtcgcagcacgctcttccgacagcacctggtttgacgggtacttcgccgtcttgatgggaacgttgtcgctgtggccgaccacggtcaccttgccggataccttgttgatttctccggcaaccttgtccagcaacggcaggaccttgtcgctgacctcggcgcggccaccgccgaacatgtcatccccgcggaacgtgacggcactgcgggtcgcatcctcctgtacgctgataaccccacgcgcaatctcatccttgagcaactcggcgaggcgcagcgccttgggcggctccggcggtgttgccttgccgatggcgaggatttgctgttcgagatcgtgggtgcggaacaagagttggtacttgtaccaggcgaactggccaaagaccgccagtgccagcaccgacgccgtgacccacaccggcactgtgcgaagcaggctgaggcgcccggcgtccgcgccgcgccagtgtggcgacaggtcgcgcggcacgctttcgcgtgccgcgctgatcaggtgcaacaaccgctgccgaatggcgtcgagctggcgatcgccatcggcgtggccagcatagcggccaaggaagccgagtgacaagatgtgatagatcacctcgatcacgtccatgtgctctgcggcggagctcgccagccgccccaacaactggaacaccttctcgccgccatcgttttcgccatgcagctggatcagcaagctgttgttcgcccaggtatggcgcccccatggcatgccattggcagcctcatccagcgccgtgcacagacaatactgtgcagccagaacgtgctcgcgccgaatattggcgcgctcgcagactgcctgaaaatctttcgcttcccccaccagaattcccttcagtgcagccgcctgatcctgtcgcagcgatgtcggcatgtcggccagtgcgcgcaacagcggccgcgctgccgcaagcaagggattggccttgcggctgatctcttccacccgctgctcaacggacttgcgcgcgtcgttctggctgctcgcctccgctgcggcgcgtgggctcgcgcgatctcctgccttggcaggctgtgctgcttgcgagtccaattggggatcactcgacacaagtggcttgctcattgccgcactccccacagttccatacgcaactcaggaaaggtccccgctacgtgcagcgccagcccaccgtactgcgccacctggtcccagagcgggtgctgctgggacagttcaaagtagacatggccagcattgaacgggatctgccgtggcggcaccggcaatgactgcagcggaattccaggaagatgggaccgaaccagttccgccaaccgcgcagacggccccaccttggtctgggccggaaactgctgctgcaacagatccgccggaacctgcgcggtcaccgccagcacaaaggtcgcgaaacggccgatctcgcccggatcgagcaccgccgttcggatcccatgtgactgctccgtgatttcaatccgctgcgcagcgcgttccagcaccacattgagcaggaagcgcaggtcgtcaaccaatggcttcaggcaaagatgcggagcatcgtgccgataagccgcatgctcagccggccgacgggtctgggtgcgcacgaacgtcgacagttcccccgacaatgccgccaggtgcaggtacaacacctctggcgacgcggccttggccttcagcaggtgggtcagaatcggctcgtaccggttcagcaattggaggatcaggtattccgatacttcggcagcatccccgccccgcatagtggcagcagacaggcgctcggccatcgcatcggccctgagatgcaggaggccgtggatttcggtaagccatgtttgaagcaatgcactggccgtgtagacattgaccggcggaatcagcgctgcatccagtctggcactgccatcggcgcggatttccgtcactcttgtcaacggcaggccaagccaggactcggagagttccttctccggcaaaagccgaagacgcaagtctgccaactgcaccagttttggtccctgtgcgatcgaattcgcatccagcaattcctgctcaaaggcacggtatcgcgccagggaatccgtggcatcatcgaaattcgtttcttccgcatttggcgtgcggatcggcaccgccagacagatgatctgattcaggtgctcggcctgaagcgcaagcggcgccggcactgccgtatgtgccggagcgtcaaagggcgtaccgtcctggaagattccagcggcactggagaccaccagcttacccagcgagagcgcttcagcatcgatcgagaaatggtgaaagccccagaagaacgggctgagcgcggcgctacgcttgtgcgcgtagtgttccagatagcgctcctgctgctgaaagagttgcgggcgcaggaacagtccctcgctccagacgaccttgttgtaccagctcatggattcaatcaggtttggaaattgtgatggtctgctggtccaacgagacttgcagcttgaccttgcgtgccggaattgccatgcggtaccacgcagcgtccggcgccggtggcagtttgtagacagatctccaggtggctttgccaagctccctgtacccgaccagaatgccgatggcttgcgtgtccggattgagcttgcgctcgatgtcgcgcgactcgccgggccggaggatgaactcgtctcgtgccagcagatcctgcgtcagcagcgtcttgtccgacttctccagcgagtagtagtccgcattctcaaacgcgctgtcggtcttgagttcgtagacccgaaccaggaccggagagggcctgcccttgtcgtcagggttgacggtatctttggcggatacagccagatccagcttcatctgctcgcgctgggccggtgctgtggagcaggccgagccgaggaccgatgctgcgaataggccaagcagcgacacgcttctcgccatcctgtgccgtatcaagagagccttgcgagtcatgagcccacccgcgccgacaccgagccaatcagtaccgcgccgcaatccgtcatatcaccgctgaccgcacctggcacgccatcgaccttgtacaggcctcttacctgcgaaatgcggcttatcccatgcaagggacaactgactgcatccccctgacgtgcgatagggcgaccgttgatcttgcggttgggcgagcctgccagcacgacgccgccatgcgtgtgaccatcgccaacgacaacaatggaatctgccattgatatatctgctcccaggtaaatggcgtacatactgcaatgggccggtgcaactcttccgatgagcgggccagcaggagcgccccgacgaaatcctcgttggtggcaaagcgtgttcatccaattgaccattgttctcatcccctcaacgcccatccgtctgcttgccgaaccacgggtagtaggcagttgtcctgccccgagcccgcggccattccttgggaggttcgcgcttggtccagcctggcggtggcgccaccagcaccgtccacgcatcgttgggatccaccacgctggtcacgactgcgctatgcccggtctggtccgcatacgcgaccgcataggcaatgttcagccccgcgctggccgcgcgggccgggcccaccatatgttccgagacgctgcggaagtctttcaactggtccaggtccggccactgctggtgcaccgccgcacgcaggggcgcaagcactgtggtcacattgggcgcgcgccggtccatgtcgtggtagacgcggtcgaccggatgctcctgcggcacttgcgcttgcacggcttgcagcaggccctgccacgcgccaccaggggtagctgccttcgctccgacgccgccctcgtgctgttgcggggtgtacagcgccgccagcggcgcatagccccagtccgcgctgggatgtcccaggatcagcagcaccgaattttcgttggtctgctcgcctttcgggtagttgggcgcgtccatggtgtacacccacaccgtcttcttcgggttggcgttcaggtaggcaatcgccgcctgcaggtcatagaagcccacggcttcctcgcccgccatcaccgtgacattggccagctttggttcggggaagatcttcaggctcatcgcctcggccgcgctatagatttccataaagaacagccggcgcgctgcgttaagcgtgaaggtgggcaggccaatcaccatgtcgctatcatgggacagcccccgtaccggactgcccctgtcgtcgtaaatcttcacgaagaggtcatacatgcgcgcctcggcgtgctcctcattctccgccagtattgagggggccggcatgccaagccggatatgttgagcgagttcgtctaggccgttcagataccgattcgactccttgatataggtcggtgtattgatccacgcctgcgacatcccggcaaatactcggatgtcggcaaagtccggccgtcgcgtgccgttccggatcgagtagaagtaattcgcgttgaccgccgtgtggtagcccagtggatagagcggctcacggatcagggcatcaagggctttccaatagaccggattgggattgtcattcttccagaccgggttgaccccgcggacgagcaatcccggcgcgtcaccgagcttcagatgcgggctgtccgtatcagaggggttgcggtccgccattccctgcgcccacaacaggttccaatgggtcgggtagtccttccacatcagcggattcatccactgcaccccaagtacatacgctgccggcgcgttggggccgctcgcgagtgtgcgcgcagcaagtggatacggcgacggatctcggtgatagttggacatgggctttcccgatgaacaggccgacaggagcgccgcgacggtggcgcccaccatgacagcaatcgcgcgccgtacggctaccttgttcatgcgagtggccatggttctttcatcccctcaacgcccatccgtctgcttgccgaaccacgggtagtaggcagttgtcctgccccgcgcccgcggccattccttgggaggttcgcgcttggtccagcctggcggtggcgccaccagcaccgtccacgcatcgttgggttccgccacgctggtcacgactgcgctatgcccggtctggtccgcatacgccaccgcataggcaatgttcagccccgcgctggccgcgcgcgccgggcccaccatatgttccgagacgctgcggaagtctttcaactggtccaggtccggccactgctggtgcaccgccgcacgcaggggcgcaagcactgtggtcacattgggcgcgcgccggtccatgtcgtggtagacgcggtcgaccggatgctcctgcggcacttgcgcttgcacggcttgcagcaggccctgccacgcgccaccaggggtagctgacttcgctccgatgccgccctcgtgctgctgcggggtgtacagcgccgccagcggcgcatagccccaatccgcgctgggatgtcccaggatcagcagcaccgaattttcgttggtctgctcgcctttcgggtagttgggcgcgtccatggtgtacacccacaccgtcttcttcgggttggcgttcaggtaggcaatcgccgcctgcaggtcatagaagcccacggcttcctcgcccgccatcaccgtgacattggccagctttggttcggggaagatcttcaggctcatcgcctcggccgcgctatagatttccataaagaacagccggcgcgctgcgttaagcgtgaaggttggcaggccgattaccatgtccgagtcataagggagcccccttctgggctgaccgtcataaccggcatagttcttcacaaaatagtccgccatacgctcatcggcatgctcttcgttctctgccagaatcgacggtgccggcattccccaatcgatctgctctgccaatcggtcccggccattcatgtatcgattggactccttgatataggtgggtgtattgatccatgtctgcggcatgccggcgaacactcggatgtcggcaaaatccggccgtcgcgtgccgtttcggatcgaatagaagtagttcgcgttggccgcggtgtggtagcccagtggatagagcggctcacggatcaaggcgttaagcgctttccagtagaccgggttgggattgtcgttcttccagactgggttgacgccgcggacaagcagccccggcgcatcaccgagcttcagatgcgggctgtccgtatcggacggattgcggtgcgccagtccctgcgcccacagcaaattccagtgggtcgggtagtccttccacatcaggggattcatccattgcacgccaagcacatatgcgactggggcgtcagggccgctcgcgggcacgcgcgcagcaattggatacggcgacggatctcggtggtaggtagacatgggttttcccaatgaacaggctgacagcagcgccgcagtgacggctcccgcgatggccacggctagccggttggtgtgctgtttgaatcggtcagtggtgttcaccgagccctccctgcagaacttgcccgccgaaggctgggtcacgctcggtgggtcggtgatgcttgtttgcggaaggtgtctgtgagatgcggttgtccgagcgctcatcatccataccaagcgctctcggaacatcagctttgtaatccttttgactctccagccgatctccatttatccgaccagaaccgtagtaccaactccattccttcatctgatcgtcttcccggtcacagcgcctccagtccgccagttgcctcagccacttcatctccgcctccggcatcatgcagatgcccacatcaacgtcataggcgagcaccttctcgcagtgcaccggattggtcaggatggtcgagtggttcgtagcattcagatccaccgcgtatttcaggaaatacccgcgcttgtctgcatcgaactcgcggaattccgcatactcgtcccccgcaaggtccccgccatccttcatctgctcaatggccgcctcatagggatcgtcagccttgcgtcgggcaagctgacgcacgctggcattgtgttcatagcgcagcgccgcttcgtcgctgtagtccgccgcgccctgccccgcgctccggtacttgtcgtagatgtcgtcgctcctgcctgccggattgagcgcatccgtgtgcgactcgggtccctggttgaagatcccttccactgtcccggctttcgcgctttgcccaccatcgtcaggcgcccgtttgtcggggtgatacaggtggatggcccgcggcgcgatggcctccttcactgccggggcattgatcggcacggtccagccgtccggtgggtcggcgttcacgggcacatagttgacatgcccgaacgtcgtcacccttagcagggcgaaggccatttcatagattccaccgagcgcggtcgcaccaagcttttctccgaagccgcgctggtcgtcctgccatacccgcgtcagatgaaagcgcagtggcaatggcttgcggtaccagaatgccttcccatcgccctggatcggatcgaccttcgacgggttacctttgtcgtaatagacgaagttgcttggcttggcaccaacttcgaatggcatctggccatacttgcccggattgccctgggcccacacacgctggaacaagacttcggcatgatgcgcgaaagcataggggcgatcgccgcgcgccttggccgactccagcatgtcgtgatcggtaccggccagcacctccttcgacaggcccagccaccccatcccctgcacggtgcttactgaaatcacttgatcgtggggattgctatagaggaaaacgtgcttgcgtgtctgacgttccttgctgtccttcccggcagtccagggggcttccccttgcttgggacgccgggtgggcgtcagggcgttgacgcagtcgtcgctggcatgatcaaagctggaggcaccgacaatctcaaagaagcgatccagcgtcttgcgccgcgcaaaaacggtgacgcggcccaggtccgtgtcggcgttgtactgcccgaagttatcgaagaagttcggcaggacgctgtatggcggattggcgagtacataggtgtccgccacgccatccccgccgaagtcatgtttgccaataaatgccgaggccatgccgaccatattgccctggctgtgacagaccaccgtgaccggacacgccttgccataggcgtcaatatgcttgacccggacttgcgccaccagtgcggccaggcgccgggcggcatgcgctccatagtggcgtggggggcagccgtagatcagccggcttgtctccgtattcaggtcctgcgcctgtaacccggcaaacaggtcggtgaccgtgcccgtggtccacagatccggcagggcagagcatccgttggcgaagggaccgccgccccaggcatcctcttcgtcaagcaagatgtttggcccaaccgtcgccaggtcctccttggcagctttatagccccagcggaatcggataatggggctctggtcgccatcggcaacgaagttcgtcgcattgacttcccgggacaggtagcctttgggtgtcagctccgacagatactgcgctggccgtagcgcccccatgtcgtacgtatcgcccgtttccccgcgctgctggcgctgattcaagcctttgcacaagccttcttcagcgctggcgaaccattcgccgttcgagttcacgccgtgcacgaagatgatgatgccgggcagcgtcttcaggtcgagctttcggagcgccttacttggaacgtgaatgtcgtcggcgctggcaatcgggttgaccccttgtctggatactatgggtgcactcatatctggttccgtgacaatcgatgcgaagcagactcagtacagcttgggcgcaaatatctttacgctcaccgcctcgatcagatccgaagccgactgcgcggtttcgccagcggcattggttacaccttccaccacactgccgtccgccttgacaatctggtagggtgcattggggaccggtcgctcgagctcgcctgccttcagcaggaactttcggcccgcgtcaccctggctaaactgcggcaacggtccgttcaggctggacggccctacgatgtcgaaatccgacgtatgcagcaggatcccgccaggaccatagatatccaccttgcctccgccaatgcggatgccggcaccgtccgctgtcatcaagctcaggctcttgcccgcgttcagaacgatgttgccatcggttgcggtcaccactacgttctgtctggcattcgcttcgatgttggatttctgcgcctgcagaagcagattgccctgatgcgcaatgccgcgcagctcaccgctgtgcgcgaagaacccgattccctgccccgcattgacaacgaactgctgccctgcggtcatttgctggttcaaccgtgagacggtgtcgatatgcttgccggcatacgtcgtcaatatcttgggcgtggccagtgccatgcccgccggcgcataggcaccgatcagcggctgacctccctcaccaggcacgtccttgtggttgttggcgccagcgtcccactccctgacggcccgcgtgagttcggcctgcgggtccgtatcggcagccagcccttcatgggcatggccatagtcccccaacgccttcgccgcctccagcgccgcctccatgcagcggataaactcgtcgcgcgacaggtgcccgcccatggcgcctacctgcccttccgcggtaacgaacaagcccttcccaccgcgtatggcaccctgcccatcggtgcgcaggtcgaagccttcaccacgccggtccttgcgcccggcgtggtccggcaccccggtcagatagcccaggttcagttgcgatgcctggtgatccgaggacagctgcgcctggatctgatccttcgtatcgtccatcagcaggtgattgtggcgcccgccaaacaactccttgctgcgaatccccgacaaggcatgctgccccggcagcgcccacggcggcagattgagctgattcggcgcccgcccgacaatcacgggacagtccggatcgccgttgatgaacgccacaatgacctcctgcccgatacgcggaatgtgcatcgcgccgaactggtcgcccgaccagccgttgaccacccgaatccacggtgacgagttctcgtcgtacttcccgtagcgatcccattcgaattgaatgatcacgttgccgtgatcgttgcaccagatctcctggttcttcgggccggtcaccacggcccgctgcacgccggccacgtatggcttgccgaccgtgcgcggcgggcgaaagacttcatcagtggggtgcgcttcaaacgcaacgcggcacgaaaactgttgcccgctgccggattcgccgccgacatcctccagctccagcgtcgcaccgatcaccagatactcgcggttcatcgccgggttgccgtgattgctcaccaggtaggtgcagcccgccaccactccgcgcagcgcacccacgccccgcgcacgccggccacgcgagcggcgctcctccatgcggatcctcgcccgcatctcgcccaccgccggatcgacatagtcgcccgggtgctcgtagcgctcgaagtcggcgaagctggtattgcgcggctggctgttgtcggtggtcagattcgcgcgcggcttgcgtggatcgtagtcgttcaacgtcaccttgcccgtgcgcagccggttgaccggatcgaagcggaccagatgttcctggtcgatcttgaagccacgcggatagagtggcagcgtgcgataggcctcgctgggaaacgcgcggtacgcgcccgattcggcggccaggatcagccgatggtgtccgccgtcatgctcgaagaagtatgtaatgccatactcttcggtcaggcgctggatgaaatgcgcatcggtctcgccatgctgcacctcccaggcaagcttcggatagaccgatgtatcgaggcgcttctccaccgagaacgggtagtccgcaagcacctcgtcaagaatctcaatcaccgtcttcttctggaagggcttgaagtccgacgtctgcgtcgcgagccacagccagggacgcagcgtgaaccggtacaagcgattctccgcaacgccgccgacatgctcgatatctgagatgacgccggtgatctcgcggtgccctgcgcccacgccacccagcagccctgtgcccatgccatcgagctcgatcgtgacggtcatctcgcggccgatcatcgcatcgggatctgcctccgcaagatactgttccgcggcaggcgagaccgcacgcaggtctaccttgtaggtgaagagttcgctcaatccctcatgacctgagagcctcacgaattccagctggggctgtcccagcaaatcaggaatggctgcgctggaaacgctaacggtgcgagaacacgaagcaaaagcagctagccgattcatgggatgggttctggtttccctgctcacctcctctctccctccaccgcacctggccggggccggatcgaattcgccaccttgtcccaaatcctcagcacctcatcgtcatccatcgatgagtcgacataagcgccaccaggaatctgtccgccggtcattaacgtaagatgcatctgcggctgcatgtactgcggcgtatcccgcttggtctccgccttcaaaccctgccgcctgtatccctcttccttgaaggtctccacaagctcatctgcttccatgccggcaacggttcgcttgcccttgcgtagggtgtggaatgcgagccgatatgccagcggggcgccttccaatcgcttttccagtcgcgcgatcatgccctcgtcctgcgtgacaagcgcgcgcgaatggatgtcaaagagaagatccttatggagttcactttgaaaactgaacatcgccgtctcttcgtcgtggatgtcgttcagcactacgcctttgacacagaagccgggaccggcagcctccgggtcggtataggcgcgagtgtggactgcgaggtttcgcaaccgcgcttctaccgcttccgccggctcgctatcggggtagctcttttcctcaaagatgacgtatcgcaagtctcccgccaggaggtggatttcgcttctaaagtatttaccttgctgcgcattgtcgtagcgacgaatcagatagcctccttcaccttcacctaacggtgtactggacaccaacatcggggcatgtgtaacttcattgcgtgcatcccttagttcttgcattcgcttactcaccgcccgctcaaaatcttcgcgcaggatgaccggctctgcctccaccggacgttgcttgggcaccttgacatagatgcgcttgaagtccttatctttgccatagagcaactcggcatcgccgggactgtccatcgaatccggtaccgaattgaactcttctggcaggtcaattaggaaacggccaatgcaatgcgtcttgtatggctggtggatatccatgggcggaaagggatttgtggccgctcgttgacagccagtcgttagaagtgcggccagaaacaggccagccatgttcagtttggcggccatatcaagttccccgggggcgtcctgacttgtgccgtcagcttgacaatgctatacagcgtcacgaactgagccatctcattccagctggggctgtcccagcaggtcgggaatcgccgcgctggaaacgctaacggtgcgattccgcccaacggccaggctcttcagattgtttagcgcactcatgaggtcatctctttaacggccgctcggagtctggccgttgtcatccgcatggattccgcactcggtcaatgccagcgtccttggcctcgccagcttccactcgggtagccggcgagaccggtcatgacaatcaggcttccttattgcccttgatgtcgtagcccgcggtcacagcaccaccgctgccgccctgggcgttctgcaccacatactcctgcttcaccctggagaacgacagcgccaccttctcgcgcatgcgcacttcgtcatccaccgagcccttggggctcaccttggtgacgatcacgtcggtcatggtgagcttcaggtattcgagcggattgccgccggccttgcgcaccaccagcacggcctcgttgatgtgcttgccggtcaggcagtacttcatcaggttgggcgaggcgcggtcgatgaagtgctcgaaggacaggtccgacacggtcgccttgccggcgccgccgccgctgcccgcgtgcatggtggactgctgctcgatgctccagtcccaggccagcacttcgacttcgttcttgtgcgacgaatcctgcgactcgccatcgatgccattgatcttcaggaaaatgtcctgtgccattgcaaaactccttgacgttaagacaggtactgcagacaagagccacagccagggccgcgccccaatcaggtcaggggcgcgatacctcggcgtggaactaccggtacgtttcaacgcctgagcgacgctcaggcggcgtccttgaccgacggcaggcgcgccacaagccgcagcggaacggtcaggccctcgagctggaagtgcggacgcaggaagaacttggcgctgtagtagccggggttgccttccagttcctcgacgaccacctcggctgcagccagcggtcggcgtgccttggtctcctgcgacgagttggccgggtcggcatcaacgtaattcatgatccattcgttgagccagcgctgcatgtcctcgcgttccttgaaggcgccgatcttgtcgcgcacgatgcacttcaggtaatgggcaaagcgcgagcaggcgaacaggtacggcaggcgtgccgacaggttggcattggcggtcgcatcagcgtcgtagtactcggctggcttctgcatcgactgggcaccgataaaagctgcgtagtcggtgttcttgcggtgcaccagcgagataaagccgttcttcgacagttcggcttcacggcggtccgagatggcgatttcggtcgggcactttatgtcaatgccgccatcgtcggtcgggaaggtgtggcacggcaggttctcgaccacgccgccgctttcgacgccgcggatcagcgtgcaccagccatagagcttgaacgaacggttgatgttgaccgccatggcgtaggcagcattgctccacacgtacttgcggtgatccgcaccgtcggtgtcttcctcgaagtcaaattcatcgaccggattggtcttgatgccgtagggaaggcgcgacaggaaacgcggcatggcgaggccgacatagcgggcatcttccgagttgcgcaggctgttccacggcgcgtattccaggttctggaatatcttggacagatcgcgcggattggcgagttcctgccacgaatccatctgcagcaccgacggcgaggcgcctgcaatgaacggggcgtgagccgctgccgagatcttggcaagcgagccaaggagttcgacgtcgggcggtgtgtgatcgaagtagtagtcggctaccaggcagccgtagggttcaccaccaagctggccgtactcttcttcatagatgcgcttgaagaacgggctttggtcccagccgatgcccttgtagcggcgcagggtccggcgcagctcttccttggacacatccatcacgcggatgcgcagcttgtcgtcggtttcggtgtttgagaccaggtggtgcaggccgcgccaggcggactccagcttctggaagtcctcatggtgcaggatcaggttgatctgctcggagagcttcttgtcgatggcgccgatgatggcttcgatgctcttgtaggcatcatcgctcatggtgaacgagctggcgagcgcctgctcggccagggtcttgacggcgaggtcgacggcctcgcgggcctgttcggtcttgggcgagaattcgcggctgatcagcgcggcgaagtcggaatggtcagcgctcgcgagcgcttggtgttgtgctggttgggcggtggccatggaatccttgcttgatgaggtggttcaggaaggcaagtagccgatccattcaggactgcggcgactgaggttcgtcgtcgccggccctgggcttgggcgccttggcaagcgactgcagcagcgcgggatcctgcagcaactggttgatcagcgattcggcgcccgacttgccatccatgtaggtctgcaggttggcgagctgggtgcgggcttcgagcaattgcctgagcgcatcaaccttgccggctaccgccgcgggcgagaaatcctcgatgctctcgaatgtcatgtcgaccatgagctggccgtcgccggacagcgtgttgggcaccgcaaacgccacgcgcggcttcatggccttcatgcgctcgtcgaagttgtcgatatcgatctcaagaaacttgcgatcggcaaccgccggcagcggctcggccggcctgcccgacaggtcggccagcacgcccatcacgaagggcagctcgatacgcttctccgagccatagacttcgacgtcgtactcgatctgtacgcgcggcgcgcggttgcgcgcgatgaatttctgcgaactgttcacaacagacatggatctcccctgcgggttacatggacatgccggtcggcgtcaagccgagccggcctcgggacactccggcacaacggcatcgtggccaacgcggtattcggtgtggtaggcgagcccggcaggcgcgctgtcggcgacgcggatcgcgatcacggcgagctcgcgcttctcggacagggccaacagccacaggcgcgccagttgcggctggatgacctgctcaatgaagccgatcagctgccgggcgccggtctcgccgaccggacagcgcgccacgatgaactcgaccaccgggtcgtcgtaagtcagcacaatgccgtgctgatgctgcatgcgcaccgccacgcgatcgagatgcaggcgcacgatgcggcccaggttttcagccgccagcggcagatatggcacgactaccagccgcccgaggaacgccgccgggaacaccttgcgcagctcgggcatcagcgcgtcgcgcagtgcagcgggctccggcatcagcgccgggtcttcacagagattcgccagcagatcggagccggcattgctggtgagcagcaggatggtgttcctgaagtcgatatggcgcccctcgccatcctccatgtagcccttgtcgaagacctggtagaagacttcgtggatatcggcatgggccttctcgacctcgtcgagcaacaccacgctgtagggccggcggcgcaccgcttcggtcagtacgcccccttcgccgtagccgacataacccggcggcgcgcccttgagcgtcgagacggtatgcggctcctggaattccgagaggttgatggtgatgaggttttgctcaccgccgtacagggcgtcggccaacgccagcgcagtctcggtcttgccaacgcccgacgggcctgccagcaggaagactccgaccggcttgttggggtcagtcagttgtgcacgggcggtcgtgacgcgctccccgagctgggttagcgcatggccttgcccgatcacgcgttcgccaagtgtctgcggcagctgcatcacggttgccacctcgtccgcgaccatgcgcccaaccgggataccggtccagtcggcgacgattgcggcgaccacgcgttcatccacttccgtgtacacaagcggcgcatccgcttgcgcggcatgaagatggccctcgagctcatccagggttcgtcgcgccggcgcggccacagtcgattcatccgacgcggactgcaccagtgcgtatcggcgggcgaccaggtcggtcgccagaccgcgcacccggtcccagcgcgccgaggccaaagccaggtcggcttcgaactgctcgcgccgagcccgtgcgagcgcaatccgcgcagcgtccggccggccaaagccggcttcccgggccaatagtgcgcactcggcgtcggccgcggcgagttcgtggcgcagatgttcgacttctgccgggggcgcatgcaatgacagggctacgcgcgcacaagcggtgtcgagcaggctgatcgccttgtcgggcaactgccgcgacgggataaagcgatgcgatagcctgacggcggcgcgcaccccctcgtcgcggatcagtacctggtgatgcgcctcgaacgtccggaccagaccccgcaccatggcaaccgccctggcttcgtccggttccatgacctgcaggacctggaagcggcgggtgagcgccgggtccttctcgatgtggcgcttgtattcgctccaggtggtggcgccgatcgtgcgcagtgtcccacgcgccagcgccggcttgagcaggttcgcggcatcgccggtgccggcctggccaccggcgccaaccagtgtgtggacctcatcgacgaacaggatcacgggcgtcggggatttggcagcttcctcaagcacgcccttcaaccgcgcttcgaactcgcctttcatgctggcgcccgctagcagcgcacccacgtcgaggctcagcagcctgatgtccttcaggctgggcggcacctcacccgcggcaatggcctgtgccagcccctcgatgacggcggtcttgccgacacccgcctctccggtcaggagcggattgttctgacggcggcgcagcaggatgtccgtcatggtgcggatctcatgctcgcgaccgatcaccggatccagccggcccgcgcgtgcctcctcggtcaggtcgcggcagtacctgcccagggcgggcttgccggcactggcaggtgccgtcgcgccactggcttcacccggtgtggccggcgccaggccactgccgtcataagccgcttcacggctctcaggcgattgcgcgatgagcgccggtgccatttccaccaggtcatcgggccgcaccttcgcgaactggcttgagatgcccagcaccgtacggcgcaactccggcgtcttgagcagcgcagcgagcagataagcgccgcgcacgtggtcatcggaaaaagcaagcgtcgcatagacccacgctcgctcgatcgccgactcaagctggaacgaaaagtcactgatcgaggtggcgccggcaggcaacgcggccagcgcgcgggtcaggtcggcttcaagcacggacaggtcggcgccggcatggcgcagcatccgctgcaggtcgccatccggggcttgcagcagttggtggagccaatgcacaagctccacgtacgggttgccgcggagcttgcaaaaggccgtcgcgctttcgatcgccttgaatagcgtgagattgagtcggccaaataaagcctgacgcgaaatatccattcgatgcctttgccgttcgccccttggataagaggactaccattgcacggagattttgttatttggcttttttaggatatgaccaaaacaatacgctagcaaatgtctcgtccgcgaccaggcctctggcgcatcggcaccaaaaatctatataactcattgattttatgtactttattcactccatcgcgcggttatcacgttttcttctggccgacaatgacccaacaccatgtccccatggaatattacaaattttgacaatccatccgagatatacataatttttatccaatgtccataggatcacccttaaatctctatgatcactttttaattctgattttccggatattaaataggaaaattccattccatttagaatttcgttacaccaggatttgcgattatcatcagacgctttcgaaaaccaataacctcaggtggccgggctatgagcgactggcagaaccgcactgcggaaatccacgccgtcaacgccagactcgatggcgacagcaatgcgccctggccttgggatgcgctcggcgggacgcagccagacggtgccgatccgttctcgctggtgaagccagccggtggtgcggggacaacggcggcggctggccctgagccggccgacgtgctcgatcagctcaaacgcgaggccgaggcggcgctaagggacccgaactacgtcagtgcacatgccagctccaacgcagcgtcgacagctccgatcccggcggagggcgaaccgaagccgctgcaaacgctcgcgcgcgaagcgaaccatgccgatagcttgatggacatgctggacacggcaggccatattgattcgctgatcggctcccgggaatccctggaagagcacgaactcttttcaaccccggctgcgccggacgtgctgtggctgttcgctggcgacattgcgcccacgcggcgccgcgatgtcacggccctgcttacccgtcgcgaacaccatctggtgtcgatggacagcgcctaccgtcccgcgccggcgctgccgcctgatcctggccatgacgcttgaagcgcacacccctcgtcaggcacccggcacggggctgtcatcaatccttcgccgaagcggctcggtcaaaggcgcgctggcccagacggaggcgcaggtccgcgaggaacctggctctttcgctttccgttggcagctattccagtggctctgcgtggtcggtgactggtccagggccctcaagcaattgcaggtcgccacgcagcttgcgcccggcttcgcgcaaaccgcgcatgtgtaccgcgacctgatccgtgcggaggtgtttcgtggcgaggtattcgccggccagcgcacccccggctcgctgctgccggccccggcgtgggtggcaaagctccacacggctctggcggaaaacaaggccggcgaatgctcagccgcggacgccagccggcacctggccctgtcgcaggtgccagcctcagccggcgcgcacgacggcgtgcgctttgcctggattaccgacacagacacacggctgggaccgacctgcgagatcgtgaccgcggggcgctacgcctggctgccctttgcgcagatgcgcaagatcgagttgggcaaggcgtccgggttgctggatctgttatggcgcccggccacggtgacactcgccgacggcgtggtcagccgtggcttcctgccggtgcgctacccaggctccgaacaaggcagcgacgggattcggctggctcgcgaaaccagctggagtgaagcgggtgagacaggtgtcatcggtttcggccagaagacctggatgacagacacgggagatgtcgccatgctggatgtgacaacgctcaccctggacgcggagcatggctgaacaccgcccgccgcgccgcccgaattcgcaactgctgccgacgttgctggaccggctgcgcgacgacgcgccccagcgccagacggaaagcgcggacgaatacaccgtcacgcgtgcccagatgcgcgagatcatccaacgcgacctcacctatctgctcaacaccaccaatcgcgaggatgaaatcgatcgcaagcgctatcccgctgctgccgcatcgaccatcaactacggcgtgtccccggtcgccggcagttatctggccgaacacaagtggagcgatatcgtcaccatcgtcaggcgtgcgatcctggacttcgaaccccggctcatccccggctcgctggaagtgaagccgctactgaaagaagatgcgccacaacgctataacaccctggtgttcgagatcaaaggcctgatccatatgaacccgtatccgatggcgttcactgcccaaagctcgctcgacctggaaaccagccggatgagtgtccaatcgatccacgccagctgacaccatggatccgcaactgctcgattactacaatcgcgagctcgtctatatgcgcgagctggccggggaattcgccaaacagcacccgaaggtcgcgaaacggctgggcatgcagggcatcgaggtggccgacccctacgtcgagcgcctgatcgaggcgttctgcttcctgtcagcgcgtaccgagatcaagctggacgcagagttcccacgcttcacccagcggctgctggaggtgatctaccccaactatgtggcgccgacgccatcgattgcggtcgcgcagttccgacccagccagaacgagggcgattttgcgcatggcgtggaggttccgcgcggcacggaggtcaacgcggcggcggcgcctggagagaagacggcctgccagttcaggaccacgcagccgttgacactgtggccggttgagatcaccgaagcgcggctcactggcattccgcccgatgtcagggggccggagcgctatgtgcccgcccatgtgacagtacagggtgcactgcggttgcgcctgcgctgtacgcgaggcgcgaccttcgaccagctgcccggcctggaccacctgccggtctatctgcgcggcgatgacctgatcgcctcacaactgttcgaactgttgcacagcgccggtgtggcgacgctgatcggacaccccggggccatgagcgagcgcccctgcgcagtggcgcaggatgctgtcagttacgtgggaatgggaccgggcgaaggcgcgctgcctttgcagtggaacagcttccacgggcacaacctgttgcatgagtacttcgcttgcccacagcgcttctatttcttcggcctcaacaagctcgctcagggcctgagccggatccgcggcaaggaagccgagatcgtcgtgctgctgtcaaagccgccccgggatctgaccagcaaggtcgaccgcgaacagttcgcgctgttttgcacaccggtggtcaatctgtttccaaagcgcaccgatcgcatcgaggtcacgccgggccgcgccgagtttcacctggtcgccgaccggcagcatccgcttgactacgaaatccacaccgtcaggcagctctgcgcacaaaggtccgagcacagcgcaggcatcgacttccagccgctctttaccaccctgaatagtgatgaaggcaaccacggccgctacttttccctgcggcgcgagcgtcggctgatctctgagcaggctcgcaagtacggcacacgcacggcatacgtcggcaccgagctgttcgtgtcgctggtggaccagaacgaagctccctacccggacgccttgcgctacctgtcagtggaatcgctggttacaaatcgcgatctgcccaatcttgtaccgcgcaatggccggcacgacctgaccccggcagcttccatccccgtggacgggatcggcctgatccgcgcgccgtcggcaccacggccgccctatgcggacggagaaatggcctggcgcctgatacggctgctgggcttcaactacttgtcgctgaccgacctggagcatcgctcaggcggccagggcctgcgtgacatgctgcggcttttcgtggcgaacgacgacctcgcgcaccaggggcaaatccagagcctgatcggcgcgaacgtgaagccagtcatgcgccggctgccaggcaacgggcccttgatctacggccgcggcatccagtgccagctcacggtggacgaaggcggcttctccggcatcagcccatatctgttcggcgtggtgctggagcatttcctggcgcgccacgtctcggtcaatgtcttcacgcaaaccgaactgcactccatgcaacgcggcctggtgcatcgttggcccgtgcgcatgggcggccgcagcgccgtgtagccatgttcaaaggcaacgacgacaatgtgccgccctcgccggcggcgacggccgcgcccggaaactatgccggccaggcgccgtggaagctgagcttcctggggctcctgcggcatctgtccgcccggcaccctgacttgcccccgatcgggcaggcaagccggccacgcgacgagcctttccgggctggccagcaggccgcgctcaccttcgcgccccgggagatcgcgcaggtgcagccgctggccggccggctcaaggtgcaattgtttggcttgggcatgctggggccgaacggggcgctgccgattcacctgacggaagttgtacgcgagcgtagcgaagcacaccgggacaacaccaccgccgacttcctggatcttttccaccatcgcgccttcacgcagttctaccgcgcgtgggcaagcgcccaagccaccgcgggcctcgatcggcgcgacggcgaggtgttctcccgctatgtcggctggctggcgggcaatgaagccgacgaaatcgcgcacagcaccctgccgccgcacgcccggctcgctgcgagtgcgcaccaggtgcgcgaagcgcgcgatcccgacggcatcgcggccacgctttctcacttctttggtgtgcccgtcaggcttgaagagtatgtattgcactggatcgccgtcgatccggccgagcgcagccgcctgggacacccgggcgccccaggcgtcatggggcaaggcgccatgcttggcgaaatggtgccggaccgccaacacaagttccgcctggtgatcggcccgctcgggttgcagcaatacttgaacttcacgccgaacggcagggatcttccgacgctcatcgaatgggtgcgcgccttcgtcggcttcgagttcgtctgggaagccgagctgcaggtgatcccggactcggcgccgcctgccatcctgggctcgcaggaacgcctgggctggtccacatggctgggcgaaccggatcgaagccgcgccatcaccggcatggtgttcgagcccgaacactatgcaacacactgaccatgaatgccaaagccaaggccgtaccggtgccaagacccgactttcccttcccggaactgctggaacctgtcgcacccgacaggccatgcggtgacgacctggagtacgaccctgagttcgtcgtgctgctggccaaggcggcgccgaagcccgacgcgcagtacggcaacttcgtcagcgagcccgaagccatcaactgggcggatctggagcgcgactgccggcgcctgctgctgcgcacgcgcgacatccgcatcctggcgctgctgctgcgctgccgtacccggctaggccaggcaagcggtctgcgcgacggactcgcggccatggcgcggctgctggcaaaatggcccgatgccatccatccgcagttatgcgtcgatggcgaaaccgatcccgcgatgcgcgccaatgcgctcgccgcgctgaccgacccggaggggctgatgcgggacgtgcgggagttgacgatcacaggcaacgcggcgctccggctgcagatccgggatgtcgagcgctcgctcggcgtgccgcggcccgcggacgccctggcgccggaatcggtgcggcagcaaatgcaggatctgcgccagcagaacagccccgccctcacggcactcgacgaggccgcaggccaggcagcggccattgacggttgggcaaaagccaacctccggcaggacagccccgacttgagccctctgctcaagctgcttggcatgatgacgagcactgtcgcgaccgccccggcaccgccggtcgctgcatccaccgccgcgccagtcgcttctccttcatgcggcgatgctgccggcggtctttcccctgccgcaaccgccgtgcactcaggcgcctgcaaaccgcgggatcgcgatgccgccctggccaccatccgcaccgcgcgtcaatggttcgagttccacgaacccagcagcccggtggcactgctgctcaggcaagccgagcggctgaccggcaagcgcttcgatgaagtgttccaggcgatccctgcggatctggtggagcgctgggcgcaggacacatagcggcaaccggcctgcaagctactccagcatcgcccgatgccgccccagcgcctcgcgcacgatgtccagcagcccgctccctgcctcggcatccacatgccccagcaaggccttgcgcatgcgcggctcccaaaaccgcttgatatgccctgcaatatcagagacggcctcttcccgatccggcatggcctcgaagaagctgccgatctggttggccatggtgatgaggttgtcgatcttcatgccaggctcgcttcgtgctgcaggcgttggggatgggcatagaccacgtgcgcgccggcgcgcacgaagccggccagggtgatgctggcttgttcggcaagccgcacggccagcgccgtcggtgcggacactgcggcgagcacgccggcgccgatggcggcggtcttcagcaccatttcatagctggcgcggctggtcaccagcaccgcgccgctggagatgtcctcgccgctgctggcgagcgcgcccgccagcttgtccagcgcgttgtggcggcccacgtcttcacgcaccagtgatacatggccatcggcacgcagccatgcggcagcgtgcgtcgcacccgtgtgttgctgcagttcctgccgcagttgcagttgcacgaacgcggcctggatcacgtcggtatggaagctggcatcgctgcgcaccggtgccggcaggcgcatcacctgttccagcgattcggtgccgcacagcccgcagccggtgcgcccggccagcgagcggcggcggtccttgagccgcatgaaggcttccgatgcgatctccagctgcacggcgatgccgtgctcgcgcgtgtcgatctcgatgtcatagacgtcgctggcacgggtaacgatgccttcgctcaggctgaagccgagtgcgaagtcctccaggtcggccggcgtcgccagcatcaccgcgtgcgagatgccgttgtacaccagcgcgaccggcacttcctcggccacttcatcggggctcagcatcagctcgccgcggcgccagcggctgacggcgaaggtgctgtgagtgggcggctcggcgtctccggccgcggccggatgcacctccggtgactgcatgcagcgcatcatggtgcggccctccgctcagcgtacggcctgcgccgggtcggcgctggcggcttccagcagttgcagctgctgggcgttgaactcctggtactcccgctgccacgccgacggctgcgccaccggcagcacctgcaccgcggtcaccttgtactccgggcagttggtggcccagtcggagttgtcggtggtgatcacgttggcgccggattccgggaagtggaaggtggtgtagaccacgcccggctgcatgcgctcgctgacgatcgcgcgcagcaccgtgtcgccggcacggctctgcaccccgacccagtcgccgtccttgatgccgcgctcctcggcatcgtgcggatggatctcgagccggtcctcggcatgccagtagacgttgtcggtacggcgcgtctgcgcgccgacgttgtattgcgacaggatgcggccggtggtcaggatcagcgggaaggcgcgcgtgatcttctcggtggtgggcacgtacttggtgatgatgaacttgcccttgccgcgcacgaaggtgtcgatatgcatggtcggcgtgccttccggcgcgtcggcgttgcacggccactggatgctgccgagctggtccaggcgcttgtagctgacaccggcgaaggtcggcgtcaggcgcgcgatctcgtccatgatctccgacggatgcttgtagtccatcgggtagcccagcgcattggccagcaggatggtggcttcccagtcggcatagcgcgccttgggcggcatcaccttgcgcacgcgcgagatgcggcgctcggcgttggtgaaggtgccgtccttttccaggaaggacgagcccggcaggaacacgtgcgcgtacttggcggtctcgttcaggaagatgtcctgcaccacgatgcattccatcgatgacagcgcctcggacacgtgctgcgtgttcgggtcggactggacaatgtcctcgccctggcagtagaggcccttgaagctgccggccagcgcggcttcaaacatattggggatgcgcaggcccggctcggggctgatctcgacattccacgcggcttcgaacagaccgcgcgtggtcgagtccgacacgtggcgatagcccggcagctcatgcgggaacgaaccgatgtcgcacgagccctgcacattgttctgcccgcgcagcgggttcacacccacgccttcgcggccgatattgccggtggccatggcgaggttggcaatgcccatcacggtggttgagccttgcgcatgctcggtcacgcccaggccgtagtagatcgcagcgttgccgccggtggcatacaggcgtgcggcaccgcgcagctgttccgccggaatgccggtcacgctttccatcgcctccggcgagttctccggcagcgagacgaaatcgcgccattgctggaaggcgcggtcctcgcagcgctcggcgatgaaagcttcgttgagcaggccttcggtgacgatcacgtgggccagcgaggtcaccagcgccacgttggtgcccgggcgcagttgcaggtgatagtcggcacggatatgcggggagtcgaccaggtcgatgcggcgcggatcgaccacgatcagcctggcgccggcgcgcaggcgcttcttcatgcgcgacgcaaagaccgggtggccgtcggtcgggttggcaccgatcaccatgatcacgtcggccttctccaccgacttgaaggtctgcgtgccggccgattcgcccagggtctgcttcaggccgtagccggtcggcgaatggcacacgcgcgcgcaggtgtcgacgttgttgttgccgaaggctgcgcgcaccagcttctgcaccaggtagccctcttcattggtgcagcgcgacgacacgatgccgccgatggagtccttgccgtgctcggcctggatacgcttgaactgcgacgcggcatagtcgatcgcctcttcccacgacacctcgcgccacggatcggtgatcttggcgcggatcatcggcttgaggatgcggtccttgtgcgtggcgtagccccaggcaaagcggcccttgacgcaggcgtggccttcattggccttgccgtccttgtacggcaccatgcgcaccacttcattgcccttcatctcggccttgaacgaacagcccacgccgcaataggcacaggtggtcacggtgctgtgcgagggctggccgaacttgatcaccgaggtctcggtcagcgtcgcggtcgggcacgcctgcacgcaggcgccgcacgagacgcagtccgattccatgaacgactggctggttccgggcgagacgcgggaatcgaagccgcggccgctgatggtcagggcgaaggtgccctgcgtttcctcgcaggcgcgcacgcagcggttgcagacgatgcacttggaggggtcgtaggtgaagtaaggattggattcgtccttcttcatctgcgtgtgggtcgcgatcggcgcagcttccgggccgccgtcgttgtagcgcacttcacgcaggccgaccacgccggccatgtcctgcagctcgcagttgccgttggtcgggcaggtcaggcaatcgagcgggtggtcggagatatacagctccatcacgccgcggcgcaggtcggccagcttgtcgctctgggtcttgaccttcatgccggcttcgaccggcgtggtgcacgatgccggatagccgcggcgcccttcgatctcgaccaggcacagccggcacgagccgaaggcttcgaggctgtcggtggcgcacagcttggggacggcgatctgcgcttccatcgcggcgcgcatcaccgaggtgccggcgggcacggtgacgctgacgccatcgacctccagggtgaccagttcggtggatgggctggcgggcgtgccgaaatcgatctcgttgcgggcgttcatggcggtttgtctcccgtgtctctgctggacctggctcaggcggccttggctgggttggaggcgaggccgaagtcctcggggaattcattcagcgcggacagcaccgggtacggggtcatgccgcccatcgcgcacagcgagccgttgagcatggtgtcgcacaggtcgcgcaccagggcgacgtgcttgaccggctgctcgccggcgatgatgcggtccatcacttcgacgccgcgggtcgagccgatccggcacggggtgcacttgccgcacgattcgatcgcgcagaactccatcgcgtagcgggcctgctttgccatgtcgacggtttcatcgaacaccacgatgccgccgtggccgaccacgccgccgaacgcggcataggcttcatagtccagcggcacgtcgaagcgcgactcgggcaggtaggcgcccagcggcccgcccacctgcaccgcgcggatggcgcggccgctgcgcgtgccgccgccgtagtcgaccagcagctcgcgcagcgtcacgccgaacgccttttccaccagtccgccctgcttgatgttgccggcaagctggaacggcagcgtgccgcgcgaacggcccatgccgtagtcgcggtagtactgcgcgccgcgcgccaggatcaccggcacggtggccagcgagatcacgttgttgatcaccgtgggcttgccgaacagcccctgcagcgccggcagcggcggcttggcgcgcaccacgccgcgccgtccttccaggctttccagcagcgcggtttcctcgccgcagacataggcgccggcgcccttgcgcacttcgaggtggaagcgcttgccgctgccgcggatgtcgtcgccgagccagccggcggcgttggcgataccaatcgcgctttccagcacggcaatcgcgtgcgggtattcggaacggcagtagatgtagccctgctccgcacccaccgcaagcgcggcaatggtcatgccttcgatcagcatgaacgggtcgtcttccatcaccatgcgatcggagaacgtgcccgagtcgccctcgtcggcattgcagacgatgtacttgaccgcggactgcgcgcccagcacggtcttccacttgatgccggtcgggaacgccgcgccgccgcggccgcgcaggccggagtcggtgacctcctgcacgatctcggcgggctgcatcgccagcgcgcgctccaggccggcaaagccctcatgcgcgcggtagtcgtccagcgacagcggatcggtgatgccgacgcgggcgaaggtcaggcgctcctgctgcttcaggaaggggatctcttcggtgacgccctgcgacagcgcgtgctcgccgccttgcagcaagccggcgtcgaacagccccggcacgtctgcggcgctgaccgggccataggccacgcggccggctccggtctgcacctcgaccagcggctccagccagaacatgccgcgcgagccattgcgcacaatgcgcacgtgctcgttgcgcgccgcggcttcacgcgcgatggcgcgggcgacgtcgtcggcgcccagtgccagcgcggtggaatcgcgcggcacgaagatggtggtgatcgtgatcatgcctgtgcctccgcggcttccgtggtcttttccgcggacgactcgcgcagcgagcgcaccagcgcgtcgaagcgcctggcatcgacatagccgtgcagctgctcgccgaccatcacggcggggccgcaggcgcactggcccaggcaataaaccggctccagcgtcacctgcccgtccgcggtggtttcatgaaagccacagccaagtgcgcgctgcgcatgctcggccagcgcttcggcgccgaccgactggcaggcttcggcgcggcagacctgcaccacgtggcgcccggccggctgctggcggaaatggtggtagaaggtgatcacgccgtgcacctcggcgcgcgacaggttcagcgcgcgggcaatgacgggcacggcggcgtcggggatatagccctgtgtgtcctggatctcatgcaggatcggcagcaaggcgcccggtatgtcctggcgcgcggccacgatggcggcgatgcgcgtggcatcggcggatgccggtgcgtggggggaaatttctggcatagcgtctcctgtgaggcattgcgcagatcggcagcgcggcctcttatatgctatttttttcctatttacgggctgtgacgtcgccgttttttcccgtttgaaggactatatgagagtgacagcggcccttcaataagctattttctacatatgattcgcatctcgatccacccgcacctgcagatccgggacgacgccagccccggtggcgaggccctggacgtgtcccgcctggtggccctgctcggccatatcgaggaatccggcagcatcagccactcggcgcaggcggtatcgctgtcctaccgctacgcctggggcatcctgcgcgatgccgaggcgctgttcggcggcccgctgatcgacaagacccgcgggcgcggcagcgcgctgacgccgctggcgcagcagttggtgtgggccagcaagcggatcggcgcgcggctgtcgccgacgctggacagcctggcgtccgagctggagatcgagttgaagaagctgatggaccagcccgaagccacggcgcggctgcatgccagccacggcttcgcggtggcggcgctgcgcgacttcctcgacgagcagcaggtgcggcacgacctgaagtactgcggcagcgtcgaggccgtggcggcactggccgaaggcgcctgcgatatcgccggcttccatgtgccggtgggcgagttcgagcacggcatgtggcggcatttcaccacctggctcaagccggacacccactgcctggtgcacctggcggtgcgcagccagggactgttcgtgcggccggacaacccgcttggcatccacacgctggaagacctgacccggcgcgaggtgcgcttcgtcaaccgccaggtgggctcgggcacgcgcctgctgctggacctgatgctggccgcgcgcggcatcgacacggcccgcatcgagggctacagcaacggtgaattcacccacgccgcggtggccgcgtatatcggcagcggcatggccgacgtgggctttggcgtggaaaccgcggcgcggcgcttcgggctggcgttcgtgccggtgatcaaggagcgctacttctttgcgatcgagcgcgccaagctgcgcagcgcggcactggccggcgcggtggacgcgcttaccagcgaagccttccgccagcgcgtcaatgcactgcccggctacgacggcacgctgaccggcaccgtgctgacgctggaagaagcgttcccggattacgctgaggcgcgctagcgctccagcaacgagaggcggtcaggatgaccggcccattgctcatggccggggatcggccctttggccttgagcaacggcagccagtcagcgcgccgcgacagttcggcattgagggcaatgaaatggcgctggtcctcgggcaggtcatgctccgagtagatcgcgccgaccgggcacagcggcacgcacatcgagcaatcgatgcactggtcggggtcgatggcgaggaagttgggcccttcgtggaagcacgacatcgggcagacttcgacgcaatcggtatggcggcactggatgcaggcatccgtcacgacaaaggtcatggggcagttgcggtacggcgggtgatgaccgcgtgatggtaacgccccgcccgcgggcgcgggacgcgccgcattgtgcgactccttcaaatccgctgaagagccgcgcccggcctggcccgggcgcaggcgcgtcaagcggtctcgcgcatcagttcttccttgcgcgccgccatggcctgtgccacgtcgcgcaggttgaccttttccttgatcgcgttcttgaacagctcgccctcctcttcctcgatatggtgggcaacgtattctgacagcaccgtgtagttggcctcgagcttgtcgccggccggatcctcctcgatcgcagcgatcaggtccttcgccacctggtgctcgacctcggcttcgtccagcaggtcgtcgatctcgtcgctgacgccgcgcagcgccggatagaagatctcctcctcgatggtggcgtgcaccgtgagctggtggcacacgtccagcgcgatcgcctgcttctcgtcgcgatcttcagtgtccttgaacgccttgaactgcttcttgacagcgcgatggtcgtccatcaatgcgccgagggcctgggcctggtctgcgggaatcttcgacttgtccacggctttctcctggtgggatttgccggcgctccggctttgcgctggggagaacgcagattccgtgcccgccccagcgcaggcagcgcacctgccagtcgttgcaattcctgcgcgaagccttgtaattgtgcccgcagcgccgcgtcggtcggaccaggcttgccgcggcttcatttgcctgcataccgtgtcttgggagccccctcacctttgccctgtgcggggcaagcgcggcatgaaatttgcggcgtggcgcagtaagccgaaacaggagtatccctgtccgaaatgcaaccgataccggacggcgcgtccgcgccgttcatcaccaccatgccgacctcattcctctactccaattgtgccgatggccagccggccatgatggacgaattacaaaccgcgcgcgaggccggctatggcgtagatgcgcgccatgccttctgggaagaagagcccgcgtcagtgcccgcgctgcagcgcccgcgcctgcgcgcgctgcagcaccaggtgcagccggccgactcggtcgtgtcactgcggctgtgcagcctgggctggagcgtgcccgaggtgctggccaccatccggcgcttccgcctgctgggggtggcgttgtattgcgtgcagctgtcccgtgacgacctggccaacaccacgccgccggaggcggtcgaggtgctgcgtgcggtcgccgcgctggaaggcgccgcccgcagcgtgcgcgtgcgcgagagcctggccgcggccaaggccatgggacgtcaggtgggccgcccgcccaagcacacgcctgaacagcgccatgcgatcctgaacgcgctggccgcgggcaattcagtgagcgagaccgcgcggcgcttcagcacttcacgccagaccgtgctgcgcatccgcgccgccgagccaggcgcccagccccatgcggcatccgcggccatggccgacgctgaagaatcggcgaccgaagctgccaccggatgagaccgacagcagcacagcgcgccgtgcccccatgcccgagcacaggaagctgcccgtcagccgcgatgaactgaaccaatgccggcgttgcccgttgtggcgcaatgccacccagggcgtgcccggcgccggcgccgcccatgcgcgcatcatgctggttggcgagcaaccgggggcgcaggaagacctgcagggctcccccttcgtcggcccggccgggcacctcctggacgaagcactggccagcgcggggctggaccgcgacaagctcttcatgaccaatgcggtcaagcacttcaagttcgaatggcgcggcaagcgccggctgcacaagtcgccggcacagcaggagatcgaggcctgcagcctgtggctggagcgcgaactggagaaggtcgggcccagggtcgtggtcgcgcttggcgccaccgcggctcgtgcggtgctgggccgcaagagcgtgtccctggctggaatgatggagacgccagtcgagcacgagggacggcttgtcatcgccacctaccacccgtcgttcgccttgcgccagcgcaccgacgaggcgcgagccgccaccttcgaccgcatcgtgcgcagcctgcgcgccgccgcgcggctggcgcgcggcggcgcggaaggctgaagcatcaggccactccctgaagggagaagattccatcggccggcaggataccgtcacgacaaagtaccgaagtcttgcaagttctcgataccgaaatgttatcgagtcgcgagaaaaatggtaatggattaatcgctgggcgcttcttaaagttgcacggacagaaggcgatcgccctctcgttctcccaacttcattgcaccaaggaatcagcatggatcccactcctcaggaaatggaagccacccgcatcgcgcgctggggcaaggtcaaaccttacggtgagaccttcatcgaaagccgcctgcccggcatgaagaagaacatctacaagatcatgaaccgcggcgtgctcgagaacaaaggcgtcgagccggcgattccgggtaaccaccgcttcggcgtgacctttatcgaaatcccggtcgggcaaggcgccagcctgcacgcgcacaagaccgaggaagtgttctgcccgttgaatggccagatggaagtcatctggggcgagaagggccagtactcgctgatgctgaaccagtgggatgtgatctcctgcccgatcggcgtgatgagagggttccgcaaccctaacgaccacgccctggtcgtgtactcggtggtcggcggcaccgacgaggagtgcggccgcattgcctggcacccggacgtagtgaaggcagccgaggccaccggtctcgtctacggcaaggacggctacatcacggaaacggaagcggacaaggcggaacaccgcgccgcagactgaagacggccgccgggtcgctcagggtgctagcgcccagtagccttcggcgctagcccgggctgccgcagattccgaccttggccgagtccggctttgcgggctatcgttccgagaccatacaggcgctgtttgctccggcaggcgcacccgagccgccacctgtacgtccgtcgcatcctgccgagcagcgaagtgcggcaacagtcgcgcgatctcggcttcgaggccgtggctgtgccagcccacagaactcgctgcccgggtcgcggaaaatgtcccgctccgggccgaagtcgcgaacaaggcacgtatccagagcgactgagaccgggcgccaatgtccgtctcctcgccaggcaacatccactctttcaatcatcaggagccgaccatcatgacatctgcctccgcagaaagcgcgctcgcgccatccgcatcgaacgcgcaatcgattccagccacccccgaggcactgctgaaggccgtgctcaaagcgaattccgggacacacgacccgcgcaccaggaccattcttgatgcgcttatccggcatgcgcacgccttcgcgtcagaggtccaactgacctatgaggaactccaccatggcctggacttcatggtccgcatcggccaggccaccggaccgaaaaaacacgagggcatcttgctggcggatattctcgggcttgccacgctggtgcttctgatggatgccaaggccgtgcttgcagccggcggcaccgagcccgcgctgatcggcccgttctggcgtgcgaaccagccggttcgcgccaacggcgcgcacatcgcaaccccggacaccacgggcgatccgctgttcgtgcagggacgcgtcgtgtcgatcgacggcacgccgatcgccggcgcgcgcgtcgagacatggcaggcagcgccaagcggcctgtacgagaaccaggacgaacaccaggaggacatgaacctgcgtggcgcgttcgagaccgatgccgacgggcgcttctggttcgagagcgtgcggccctcaggctatggcgtcccgatcgacggcccctgcggcgacctcctggccctgcagaaccgcgaccacatgcgcccggcccatcttcacttcatcgccatcgcaccagggcacaaggtactgaccacgcagatcttcgatgccctggatccctttgccttcagcgacgcggcgtttggcgccgtcggctcgctgctgcgcgattttgagccggtcgatggcggcggcttccgtctcgatgtcgaactgaaactcgaaccgggggagacgcgcctgcccaagccgcccttgccctgaacctctttcgactcacggagatgttgaacctgcccgcccggcgccctgcaacttggcgccgaagccgcggaccctgacgtgctcgctccgtagttcattcaggtcacgcgaccgccagcattggatgtccacgcaatcgtggcagtgctggcggtcgccagtccggcgccatgcgcggacgcggcgatccggccgggcttgttcttccggcgtcatgaccaaacggcatcgctcgatgccgcttggcaagaacccctgccgactcagggcaccagcacgaaacgctggcgcgcgcccctggcctgcgcggcccacacttgcccgacatcctccagcggcgcggagacgatatcgatttccatgcgccctgccgcggtatgccggcatagctcggcataggcctgcgcctggaccgcgacgggcgcatggtagtaggcaaagcccatgatgtcgaaacacgccttgcgcgccgcggcgccggcaaaggcaatggtgggcgccaccgtggtgccgatatggaccagccgcccgccgtggccaagcgccagcagcgcggcctctgccggcgcgccgcacaggtaatccagcacgatgtcgacgttgccgtcggccgcgttgcgataggcatccagcaagtcgccgggctggtcgagcggcaccaccgcatccgcgccaagccggcgtgcgcgctgcagcgcctgcacattgcgccctgccgcgatcacgcggccggcacccagcagctttgccgcggccaccgccagcaatcccgagataccggtcgcgccgagcacgagcacggtctcgcccggctgcatgcgcgcccgccacgacagcggcagccatgccgccaggccggcgttgccgagcgcggcggcgcgctcgtcatcgatgccgtccggcaccgggaaggtcagcgccggatccaccagcgcgcgctgcgccatcgagccgaacggcgcgaccggtgcgttgacgttgaagtagacccgttgtccatccgcaagccgccccacgccctcgcgcccgacgacaaagctgcccgccgccggcttgatgtaatgccggccctcggcaatggccatatccagccgtgacagcgccgcggcgcctacgtcaactaccacctgcccgcccgccggggtgggatcgtcaaactcctggtacaccggcgccctgccggcgagcgaaaccgctcctttcatgtgcttctccttgtccttgatgtccttctggtccgggtcgatctgcgacttggcatcgcctagtcagcagattacaatgcaatcgattgcacaacaaacgcgaagctggccggcatcgaggccgattctaggaatggccgcagcccggcgtccaatccactttttggcggcatcccgataaccagaaggtatggcaagcagcctgccgcacatggcacgacagcgatgagcaaacccaccatcaagcagatcgccgaggcattggacgtccatccttcgaccgtgtcgcgcgtgctcaaccccgagacccgccaccgcatcggcgacgaactggtggcgcgcgtgctcaaggcggcacaggacctgcactactcgcccaaccgcatcgcggcggcactgcgcacgcggcgctcaggcaccatcggcgtggtggtgcctgacatcggcagcccggtgttcccgccgatcgtactgggcatcgagaacgccctgtcccggcatcgctatattccgatcgtggccaatgccggcggcgacaaggcgcgccagacctttatcgtcgaccagctgctggcgcgccaggtggacggcctgatcctggccaccgccgagcgcaacgaccccgtggtggcgcactgcctggcgcagggcgtgcccattgtgatggtcaaccgcagcgacgatgcggggcgcgtgtcgagcgtggtcggcgacagccgccaggcgatggcgctggcagtcggccacctgcatgcgctgggccaccgccgcatcgggcatgttgccgggccatccagcctgtcgaccgggcatgaacgcgaggcgggcttcctgcaggcagtggctgacctgggcctgtccgcgtcccaatgcccggtggagcgtgcgccggcttatacggaagacgccggccaggccgcgtgcgcgcagctgctgtcgcggcggcagcgcatcaccgcggtcgtggccgccaatgatttccttgcgctcggctgctatgcggccgtgcgcgcggcgggcggcagctgtccgtcggacctgtccgtggtcggtcacaacgacatgctgctgatgcacgcggtgtcgccggcactgaccaccatccgcgtgccgttctacgagatgggcacgcgcgcggcggcgctgatgctgggcgcgctcgacggcagcatcgccaccacggcgcggaccctgctgactcccgagctggtggtgcgggcatcaacccggcccctgtaaggcggccgccatatggctccgcttctttgtgccttatcgtgcaatcgattgcacgataaggcacctaccctgaggcatgacgatggatctccgacagcttcgctatttcaaggtgctggccacgctgcagcacttcggccgcgcctcggctgcgctgcacatcgcgcagcccgcgctgagccggcagatccggctgctcgaggaagagctgggcgtgcggctgctggaacgccatgtgcgcggcgccacgcccacgccggaaggcctggtgttgctggaccgcgcgtccttcctgctgcgctatgccgaccaggtcaaggtcgacatcgccgacctggcggcctcgccgcgcgggctggtggcgctgggactgaccccggcgctggcgccgctgctgttcatcccgctggccgaggcgctgcgccagcgctatccggaaatccggctgcgactggtcgagaactttgcgcccgcgctacaggatgcgttgctgcaaggcacgctcgacgtcgggctgctgagcgggccggtgtcgagccccggggtctcggtagtgccgctggttgccgaaagcctgtgcgcgatcggcccctggggcgctgcgtcgctgggggatgggcctgtggacattgaacagctgcagggcctgcctctgatcctgactggggtgtccaagtcaggcgtgcgcctggcgctggaagcgctggcggcgcgccagcgggtggagctgcaagtcacgatggaggtcgaatcaatcgaggtggccaggcgcctggtggtgcgcgggttcggctggaccgtgcactttgccgcggcgatacgcgacgagctgcaggcgcagcgtctgcaggccttgccgattcgtgggctggagttgcatcggatgatcggctatgcggccgcgcggccgccgtcgcgggcgacgctggctgtgatggaaacgctcagggatgttgccagggaattggcggttgatgggaactggcctaatagtcggttgttgggggaggttttggatagttagcggacgcgcttggcgggcgcggctgttgggcagtccacctcgtcatgcagccgcgctacggcgcttgtattttgggggaacccgtggccaccacgccattgtggtcggtcatatcgcccgtttgggtgggcggcgcgttgactcgaaaacgcacgccttccagtagcttgtcccaaaggacaatggcttcctcgtcgctcagcgatgccttgtccgcagcgacgacctctgttcgcatattcgcgtggatccaagctgggtgcagcgtagaacgttccctactaaagtattgggcaccactcccgagattagcttccgccgggacctccatcgcatagcgcccaaagcaaacctgcttggtcttggcaaagagggtctgcaagcgcggtgacatcgctacggattccaactttccgttctccggcgcggcatacgattggccgcccaccatcagcagggcagtcatgctgatgatggccaaggcgcggtggatcattgctcctcccatgttgtagtgcttgtgcgatctgtcatgtcaccgaccgtgatgatgcggcgggggctcatgtgctggcctcgcccatccacgtccagacaaccagcgcttcgtcggacggcaaaagcccgaagcggatcatcggcatccctttttgccgcaggatgccggacttgctggccacccaatccgcctgagggtgttcgggcggaagcgaggcgcgccagatgccggacagcggggtggtttcgcccgaccgaaccgtgaccggatcaccggtctgcgtcggcggtgcgttcacgcggaaacgcacaccatccagcagcctgtcccagagggctacagcttcttcgtccgtcagcgatgcctgatccgcagcgccgatgcgattggccgccaccttggtgtacatcttggcgccgatcactgccggatgcagcgtcgttcgctccctgccaacagcttcccactcgaagtcatgtgtgccatccgcacggcggaccagcgattcttccccttgccagacgccgaccgtgcgcttgccctcgcgcagggtcgtcaatttcgggtagcggctacccaggtacttcctttgctcggcaatcgaagtcagcagaccaggttcgccgtccacgctggccagcttgttggagtccacggaaaagctcacatcgggcaggctgggcagccgaatgcctgcgccaaagatttcctgatagctgccggacgcgtccgcgacgaagccgtggtcgatgcagacgccgggggccgtggggatttctgcgttgtcgcgtgcacgcagcgctcgaatcagttcggggttctttcgtccgcccgaccactcatacagatgcggccctgccgtgacaaaggtgtaggtcccttcggccccatattgcttggcgacatcgcttgggaaccagcgaacttgtacactgtgttccgttggcccccgcccgaagtaagtgatttcagccgtcttgtcttttgcgagttgcgccgcgcgatatgtttccgccatttccatcagcctgcctgccgcgccgacatgggtcacaatttcgccggggaaatcctggaagccccacagtagtttggcttccgccgggacttccatcacatagcggccaaagcacactggtttggtcttggcgaagagagtctgcaagcgcggcgacagtgcaacgggttccgacatcttgttctccggatacgcaaacgattggcaacccgcgagcagcaggccagccaagatcgtggtgaagccgcagcgggtcatatgccccaccatggcgcagtgttggcaatcttgatgatcgaatacagcgcgctcgccagcacctggtcattctgatagctgccctgatgctcgtagccggtttgccggaatagcgtaccgcgcacggcttcggcggacgccttggcaggcaccgtctggtccccggcatctgtcggcggctccaggcgcagggtgagcgtctgattgcctctggtgcgcaccacgatgcggccctcggcatcctcgctctcgatggtccacgtgagtgggtcgccatgcggtgccagatcggcagtgtccgcccgccaagtcacgctgccgtagcatttctgcgaactgtcctcgccgtagctcgcataggtcgtggggtgatacaggtccttgatcttcttgtggaatttctgcgcttcggcgattttccacttagcggccgtatctgcatccatatcgacgtaaggcttgttagccggattgatccaatccggattcagcagccgccaccagcacttcggattgcgcgtgtagatgtcgtagaccggatcgcccaccgccatcggcggcgccggcttgtccacgcccagcttctgatgcaagtccagatcgctcagatacgccttcagcggtgcatccgatgcaatcggcagcgccatggcctgtcggtagtcgccggtctgcagacgcaaccatcctcgcggataggaggcggtcggcagcagctccagcggccccgaggcattggcaaataccgccgtcacttccttgcctgttctgcccatgacattgcgggcaatgttcccaaccagattgtcctgcacgtcggaccctgtgcgcacgcgcttgtaggccgccccggcgccgagcgcaggctggacgctatggtagacgccgagaatcttgtcctgcgcgttgccgtagtccggatgcagcagggcgcgggccaccaggccacccatcgagtgcgtgacgacgatcacctttttgcactgccgcccgttggccttgtacatcccgatgatttcgtcgatgcgcctggccagcttctttgcggacgtgccattgctttccagccagttgtagcccatcgcgtagaccggataccagcagttcgccacgcgcaggacatcggcctcggtcagcgcatcgccggcgccgccccaataggcggggttgacgcccagcacttccaccttcttgcccttcttccaggccggcgagagctccccggccaccagcatgtcgttcaggtgagcctccatcagcttgatcacctcgccgtaggtctcgaacatgacttcgctccagccgcgccagcgggccttctgcgcggcggtggcctcgtgcttgccacgcttggccttccactgctcggcggcaggcggcaacggcgcgctcatcagcaagccgatgtcgggcagcccatcggggacgttggcgtgccgcttgtcggaattgaccgtttcctcgccggtcatgtcgaactttccggcgtcctcggtgatctcgtaacggtccacttcggtttcatcgggatcgaagttcatttgccggcgacccggagagtcgttgcggcgggcaagcgtgtccccagtgtcatccggccgccaggcaatgttgtcgtcgcgcttgagatcttcctgccgcttccggctcatgcgaaggtggctccccatgatgcccggcaggaagatgaccggaatcaccttgtcaggcggcaccggcagactggcgcggcgcgtgtcggtcgaaggtgtgagtgcaacgacggctccggcgtgtccgccgatctcttcgccggttttcagatggatgcgatcagtggccacttgcggactccagaatctgaatcatgatgttttcagcgccctggctttgctggaacttggtcagcccatcggggccggtgaggccctcgatcacgttgccgtcggattgcgtcagccggaatttccagttcctggcgggcgagccgtcgggcagatgcaagtacacctcctgatcgaaatcgctctgtggtagcgccagggcgctggggttcatgccatccgggccatcgacactgaaatcggtcgcgtgaatctgccttaccccgcccatgccctcgacgatctgcgagggagtcacgcgcatataggtctgcccgaccttgaacagaatgccctggtcggcctcgaaaacgatgtcgccaagcgcgcggaaatgaatgttgcgtttggcggtgcccttgatgtcgccatcctgcgcttcgagcgcaatgtggtccgtggcggccaccagccgtatgccgaggctgtgcgcgaacagcgcaatccgtcgcgccgcgctggcaaagatgccgccgctgctgacgatggatgcatgcttgccagtcgtgacagccagatgctcgccgctgtgcaattgggtggatttggcggtcgtcgcggccaatcctgctgccgacgcaaggacgagatgaggcgcggtcaactcgccattgacctcgcccgaaccgcggatttcttcatcttgggccttgagcgccttggcgacgtcctgctgttcctcatcctgcgcgtgatggtgctgcgcgagctggcccatggtgtcgtgggcatgctgggcctgctgcagccggtcaaccgtctcgcccatgtccttatggtgcgccctggcatcgggtcggggctcggtgctgatcagcaggccatcgccgccgcgcacggcaccgtgcccatcggtgcgcaattcgaagccgttgccccgatgatcctggcgaccccggttgtcctcgatgcggctcaggtagcccaggctcagttgcgagcgctggtagtccgaggacagctgggactggatttgccccttggtatcgtcgaacaccagatgaccgctgctggagccgtcatgctcacggctgcgaatgccggtcagcgcatgctgatgcggtagctgccacggcggcatgttgaggctgttcggcaccgcgcccatcacgatgggcttgtccggatcaccgccgtccaggaacatcaccagcacttcgctgccgatgcgcgggatgctgacctggccgtactgcgaacccgcccatggcgtcgccacgcgtacccagcaggacatcctgttgaagcggtcccacggaaactgcacgcgcacgcgcccgaagcggtcgggccatacgatatggccttcggggccaactaccgtcgcgctttgcgggccagtgaccactggccacgggatgctcagtgccggacggaagacctcatgggtggggtgacactcgaattccacccggcagtgccaccgctggccttcaccagaggcttcggccacgtcttccagcctgaggctggtgttgagcaccacgtattcgcggttggcggcgtgctgggggtgtcccttgacgtgcatggtgcagccgggcaccacggcacgcaggttgccggcgccaaagcagcgcaggccgcgcgaacggatctcctccatgcggatgcgggcgatcatgtcgccttcgtcccacgggcggttgtccgtggcgggctgggcgtgctcgctggggaagtcgtacacctcctgatgcagcgcgccagtgttcaggcccgtgtcccgcgggtccgaactgctggcgctcaggttgccgcgtggctgggtgaagctgtaggcattggtcgtgtacttgcctgcgaccacggcatcgacaaccgagaaggcatcgaggtgttcctgatcgacccgggcgccaggcggatggatttccagcgcctggtacgcctcgctcggcatgctgaaatagccaccgacgtgatcgaccagaaccaggcggtgcttgccgtcagaatgttcgaagaaccacgatattccccagtgctgcatgaggcgggcgatgaaggtgtagtcgctctcgtcgcactgggtgcggtagacccgcctggggtatttcgccacgtcgagcctgcgctcaaccggaaaggagtacgcagacaggacctcttcgatgatctcgatgtcggtgcggttctcgaagacgcggctgttccggttctgcgaggcgatccacagccaggggcgcagcgtcagtccgtagacgaagtgccgcccttcggcgcgcaggtagcgggcacgatcgacaatgccgctgatctcgcgagtgcctgcgccaatgcgtcccgccaaccccgtacccatgccgtcgagttcgatatgcacggtcagctcgcgcccgctcatctcgcgcaagtcgaagttgccttccgggccgtggaagttgtaggccttgtccggcgtcttcagttcgatgtcgtattcgaacaggccgcagacgccttccttgccctccaggcgcacgaaggtgaagggggattgcccgagaatatccggcaatgcggggccggagaccgtgacggtgcgggcgggaaaaggcaggttgtcgcgaatacccatgcgagcggcctcctgagagaggattaccgcatggcacccgtattacgcgcgaagcaccttctgcggagcgcaggcgatgttatccgcaaaacgtgcgttacacgtgtcaaagattgcaacgtttatcgaaaagccagcaaattaggacgattcctagccatcatgcagcgcattccgctgccgcctgcagacctgtctgcctcggcacgacacccgaccgcatggcgccaaggcagacagcccgctaaaagacgtgcttgacccccaccatcgccccgaactgcgacccacccgccctgggattggaccccgccgccccggcactgactgactgggcaagctgcccaccgttatcgatgaatccagccgtggcatagaccgaagtccgcttggaaaaggcataggcaccgcgcagcgcatacagcatggccttgttggcgctgtcatggaacttgaggtaatagacctgcccggccagcgtgaaggccggcgtgatgtcgtaggccatgccgccataccagagctcgctgcgcggcgtcgcgctgccttcgttgtcgcggcggatcacgcccacgcccagcttggcgcgcgacagcagtacatagccgctcagcgacaggcggtcgtcggtcagcgacttgttgccaagcccgccgaatgcgccgggcccgccgcgcagcgagtcataggcagcggtgacgccccagcccttgtgctcataccggatcagcgccgaccattcccggcaggcagacttgctggcagggttctcgcccgcgcaattggtgccggccgggctggggccggcgttgatcgcatcgcgcccgaagctgtaggtggcaccgacggtcagcccgccgaaggtgcccttgtaagccaccgcattgtcggcacgcgtattcggcaggtagctgtcgagcgacgccgcgccgtacacgttggggccgaggatgtccgagtccaggttggcccagaacagcatggtgtactgccgccccagcgacagctggccccacttgccactcagccccaccagcgcctgccgcccgaacagccgtccgccctggttggcaccgccggtatcgggggcgaagccggactccagcacgaacacgctcttgagcccgccgcccaggtcctcggtgccgcgcaggccccagcgcgacggcacggtgccggtgagggtcggcatgcgcaccaggctgtcgccgcccgcgccgaccttgttcacgtattccacgccggtatcgatcacgccgtacatcgtcacggactgcgccgcggccagcgtcgggctaagcgcaagcagcgcggcccccatggttccgatcttcatttgctgtctcctccgtgggtctttcttgtcgttgtggtggtacgcggccgccgccctatgcagccgtggtgttgtagcgctgatggatgttgttgaggctccggtaggcaccggcaaactcccgcagctccagcgacaaggccaggtagcggcgccggtatggctcggcgaaatgcgcggtcaaggtatcgaacaaggcgctgacggtacggtcgagcacgtcctgcgagcgcccccgcgcgacggccagcgtcacgtgcacgaaggcatcgtcgctgctgccgtcggccatgcggtaggactccaggcatagcgcgcgcgcacggatgccgcccaccggaaacgcgccgtcctgcgcgatcaggaccgcgctcagtccggccagcaaggcatcgatgcgcacgaccggcgcgaggttgtgggtgtattcgacgatcaggtgcggcatggcgtattccctcctgtgcgcttgcggcgccgatggctagcgcgccttgcgcgcggcaaagccgccgtcggcatggaccaccttgccgtcgaccatcgtcagcaccgaacggatgcggtggatgtcttcaacggggacggtcaggtagggcttgtcgagcaccgccaggtcggccagcttgccggcctccagcgtgccgcgcgaagcctcgtcgaatgaaatccacgcggcattggcggtgtacagccgcagcgcctccagccgcgacagccggaagtcctccttgcgcctgacttccttgccgatcgaatagccgccgacgtggaactccagcgcgcgccagacgccggggatgccgatgcgcgtggcatccgtgccgcccgccaccttcagcccgtgctgcagggccaggcgcacgggcggcgcggcctcggccacatggtggtcgttggcgtggccgatggcgccggcctcgaagtacggccccatctgcaccgtgtaggaaagcccaagcgccttcatgcgccggaacgtctccggcttgccggtattcaggtgggccatggcccagcgcagcttgcccaggtcatggcacttgcccacttcctcgaagacatcgaggatcgcgctggcggcatcgtcggtataggcatggatctcgaccggatagccgcggctggcggcgaacgttgccaccttgagcagttcctcgcggtccttcgccgacggctggaagccaggtcccatcttcacgccgtcgtccatgccgaacaccagcatctcgcccgggccgaggaagcgcagcttgccgtcgcccaggcgcggcggcaggtaggccagcgtattgcggaaccattcggcctcgttgccagcgaccatggtcgggatgcggtagccgacccgcagcgacaggctgtcctcgcgccacaacgcgtacagcggatcgtaggccgggcccggtcccgcggtagggtcgatcagcgcggtgacgccgaggctgttaaggcggctgaaaaaggattgcaggctagccctggcgtcgacctggctctgcgccaggatgcggccgaacagcgccgacagcggccggatcgcgccgaagatccggccggtggggcgcccttcgctgtcgcgctccacgcggatgcccggcggcagcgcatccggctggtcgagcttgagcgcttcgatcgccctggcgttgaccagtgcatagtcgtacaggtactgcacataggccggattgtcaggcagcagcgcggtcagctcggcaggggtcggcgcgcgcttctcggtgaactggtcggggtgccaggaacctgtcacggccacccatttgccggggccacgcgacagcgcggtctttcgcagcagccccagccccgcggccaggctggtggtctcgccttcataccagtaggtctcgaaggcatagctctggccgccgcgaatggcgtggatatgggtgtcgatcaggccggggatgaccgtgcgcccgcccaggtcgatcacctccgtgcgcgggccggccaggcgccggatgtcccggctggtccccaccgcggcaatgcggtcgccgcggatggccagggcctgcgccactgtgtccgtggcgttcatggtgagtaccgtgccattgaccaggatccggtcggcatacgcgccggcttgcgcctgcgctcccgaagccgccaccaggcagccgacggccatggcatgcgccagggcccgtgcaatgcaacgcatatcgatgttcccttcgtgcaggagaggtggcgcccggccccccgggcgccgtggcggcgttactggcccggctgtgcgcccgagcgcttgacgatgggctcgagcttggcgatgtcggcggcgatcagcttgtcgaaggcagccggcgtcgagggcttggcctcggcgccttgcgcaatgagcttctccttggtcgccggcgcgctgagcgcttgctgcatcgccgtgttcaggcgggcgacgacatccttgggcgtgcctgcgggcgccagcacgccgaaccaggcatcgaagacatagcccggcacgcccgcttcggcgatggtgggcacgtccggcagcgacggcacccgcgccgccgtggccacgcccaggatgcgcagcttgccgtccttgacgaactgcagcgcagtgatggacggcgcgaagaacatgtcgacgcgcccgctcatcacatcggtgatcgccgccggcgcgcccttgtacgggatatgccgggtctgcacgcccgcggtcacgttgaacagctcgccgctcaggtgcgaagagctgccactgcccgccgagctgtaggtgacggaatcgggcctggcgcgcgcagccgccagcaggtccttgagcgtgcggtaggggctggaggcgctgaccaccagcaggtagggcatggtcgccaccgtggagatgcccttcaggtcgcgggtggtgtcgtacggcagcttgggatagagcgtgggattgaccgcatgcccggcggaggtcagcagcagcgtgtagccgtccgcgggcgccttggccaccaccgcggtgccgatggtcccacccgcgccggggcggttgtccaccacgatctgcatgttcgagctggtgccgatctcggcgctgacgatgcgtgcgagcaggtcggtggcgctgccggcagcaaacggcacgatcatgcggatcggcttgtcgggatacgcttcggcttgcgccgcgccgtgcagcagcggcaggcagagcgccgtcgcaagcgccgcgcgcaggatgttctggaatttcattggggtactcctggaatcgtgggggatggcctgacgtgcgccgtgctcagaagacgtggcgcatgcccagcgcaacggtctgcggatcggcgccggcggaaatgcccagctcattgatcgcaaagtcgtaggtggcattcttcttgttgaagatgcggctgtagaagccaaacaccgaggtgcgcttggacagcgggtactcatagcccagggtggcctggaccgcgccggtatccgctccgctgcggaagaagccgacagtctcggtggcgttgccacggccgttgccggccacgccgacgccggcgcgcaggctgcccgtccatagcttctgcaccacagacgcgtagtaggcatcgcgcttcaggtcgccggtggcggtgcggtagtgcagccgctcatagatggccgagaccttggtggtcgggaactggtacgacagcccgatcttcataccttcgtcgtcgcgtcccgcggtctggtagttgttgtggcgctcataggccaacacgacattgagcgggccgttgtcataggcccccgcgaacgaccacaggctcgggttgcgcggcaccgtaatgcgctcttcgttgataccccaggtcacgccgccgctgaagccgttccacttcgggctgcggtaatggacactgttcttctggcggcgatcgaaggagctggtgtcctggacattgtcggaggtcggggtcgagccattgccgatcagcgccatgtagccagccgtggtcggatagaacggatcgtaggacgaggtggcttccaggtagggcgtggtccagttgcccatgaaaaagctgccagctgagccggccaatccaatgcgggtgttgcggctggccagttgtccgctgcccgtatccaatgagatattgctctcgatctgccagatcgccttgaggctgccatacagcgattcctcgccgcgcatgccgaagaccgagcggttgttggtcagccggccggtgccgcccagcttggtgccgtcggaagccgtcgacgcatcggaatactccatcgatgtattcagccggccatagagcgtgacattgctctgtgcgaaggcgccggtgcagcaggccgcaagcgccgcaaaggcggcacccgcaagggggttcttcatattgtctccagtgtcttgcgcctgtccgaaccgatacggggatgcctgccccgccctgtgcacgaaaccgcgggcaacaacgacccctgccccatttacggcatcagcatctggtggattcttggtggcgctcttttagtgcggcggatttacgcgaccattcagcgtgaggtgattctagaaatggcgaatcacagcgtccattcgcattttcttttcgtcaccataccgatttgttattggaataccgggcccgcgccacgccttgccagtgccgcaaaagccgacgctgtcgggcttgagcataggtacttggggacgtgcctggtagccggtgtggctgtaccactgcgttccaggcataggacgctggacgccggaagccgtgcgctatgccgcgcactcccgggcgcggccgcaggcagccatgaccgctcgtcgcgctcaatagcttgtggatgtgtcgcatggcacccgccgcatcagaacgtatagccgagcgccaggtagagaaagcgcgtgttgtgtccgccaacggctttcagcgtgcggctctcatccacatacacggcgccgccattgaccagcacatgccggctcgcctgccatgcaacatccacagagagctggctgctgctgtactggccggagcggcccgcggtgccgggaaccgggatgcccgccgaggtgtagaccgcgtcgtgcgtggttgcccgccagatgaagtcacaggcgaaggtcagcttgatgccggccgcgggaaccagcgtcagcgacggctggatatccagcacgttggaggcgccgatcaggccggcttgattgaagtaggcctcttgcgttactggcctgcctttacggtcgtgtagctcgtgatcagatttcgataatcagggatgtgattcgaaaatagcgttccaagtccctcgatatcattcctccagtcgcggtgcagttcgcaggcgataccaaaccacgtcatcaactgtgccccagcctctgccatcctgttccacgccgagtggcgcgttacttcattgaacgtacccgatgcatccgtggcgacgaacacatcatagccttcggccatcgcggaaagcgctggaaaggcaacgcagacctcagtgaccacgccggcaattatcaactgcttccttcccgtggccttcactgctttgacaaagtcctcgttgtcccacgcattgatttgtcctggccgaggaatgaaaggtgcatcgggaaaaatctgcttcaactccgggaccagagggccatttggtccatcctcgaaactggtggtcagaacggtggggagcttgaaatacttggcaaggtctgcaacggccagaacattgttcttgaacttgtctggctcgatatcgcgaacgagggagagaagaccggcctgatgatcgaccaagagaacggctgcatcattcttgtccaaccgcttgtagggcttgctcatggcaatctcctttgtagcaggattgagccaaattcggcactttctgtgggtgacggcgactcaccgccgactcctattcttgtcgatcgaaccagaatttgaaagccggggcggccgtggatctttcctccgactaacggggtatgatcatttgtccgtagagacggcatgaacggtcgttgaatcgacacccagtcgatggcggagatgggtcgcaaacggaagtctgtggttgcggcaggccagcgttacatgctcgccctttccgcctcagtcaggccaatcctgacttgcgagttttcgggcttggcgtcggtcaccccatcaatgcctcgttggtcatgagcacgattttgccggccacgcctttctcaccgagcaactcgtgcgcaagttttgcctcgctaagagagaatttccgagcaatcagcggcttgattctctcttgttgaagtaggtccagcagaacagtcaagtcctgccggaacaatgccggtttcatccgcttgagccattgaatgctgtaggggaccacccgcttccggcccgggaggagccagcctccaacaatgcacacaccgaaaatcgcaagtcgctggaagcggttacgacgccccgagcgacctgatgccaggcgtcccccacgtagcgaggcagtaaggccataggctacgactttcccgcggggatggagagcgtcgcgggaacgccagatgttgctgccgccgatcccgtcgaagacgacgtctacgccgtcacccgtcaggcggcgtatctcttccacgaaatcaagcctttgatagtcaatgggtatgccgcccaggccagaaaccgccatcgcatcttgcgatgaacaggtcccgtacatttgcagcccggcgaggcgcccaagctgcaatagtgccgagccaactccgcccgccgcaccgtgaatcaagacctgctgacccggctcgactttggcgcagcgatgcaacatctggtacgcagtaacgtagttcagtacgaggctgacagcctcggccacgtccactcccggaggcacgggaaccagttcgcgctgagccagacagacgaactcggcgtatgcgccgctgatcggcaaggctgcaatgatctgaccgggttcaaccccggagaccccactgcctagtttgtccaccatgccgaccagatcccaaccgggcgtaaaaggcagcgggggcgtttcggggtgaaagccctcgcgcatcattaggtccggttggcccacaccggctgccagcaccctcacccgcacttcgccgaccttgggttcggggcattcctcctccactacgtgaagcgcatcgggcccgccgtagttggtgactatgatgcgcctgtgtttcatagcgttggagagtatccgtctcgtaccacaacaacgtcgcagatcggcgacactagcgacaaagccttgagactagcggctcgtatgtacgcagcctctgcattaaaactaggtgctatctcgccagcgcggttgacctaagtcaacggggttggccttgacgattcagcctacagaatgcattccatccgacgcaccaaagagcatcactgatctatcgacggaccaagaatctgcgtgccgttcaattgtttgtcggccataccacttgagagcacagcgcgctatcttggagtgaggtgcgtggccggatagcggtcgcttgccggcctagtaactgccagtttctgccatccaacaggtggcacccaacggcggaagctccttctaatgtggccactcgcgcgaccgccctgagttcgtccccaaagcgtacgccgccaataccgttgaggcgggcgacttgcgtggacaagcaagaattcagggcaagccaggccaattctgtcctaatgggtttttcaaaacggtgcgaagcgccgttcccgaccttgaaacggtcggtgatccgcagcaattggaacgcgccgatgtcggagcggggacatccaggactcgctttctcttgatccggcgcaaagcagccacggcccttcatgactattcactatccaagtgccaacctttcgggggagccggccatgtacccgattgtcgaaacgcgtcttggcaaggtgcgaggcctccgctgcgatggcgtgtacgcgttcaagggcatcccatatgctggcccaccgttcggcatgaacaggctgcggccgccgcaatccgcagcaccctggcgtggcgtgcgggatgcgctctcgtttgggccgaaatcgccacagattgcgtacccgcccggcatcgcggaggcactcggagaactcgttggcggcggcgaggattgcctcggcgacggtctcgccaatctcggactacttgaccagatcgccgcgctcgagtgggtgcagcagaacattgatgcatttggcggggacccaggtcaggtcactatttttgggcagtcggccggcgggatgagcgtcgcaaccctccttaccgtgccacgcgcgcaagggttgtttcggcgggcaatcgtggaaagcggaaacacaccccatgtcacttcggccaacacggcgaaacgcattggccacaggctggcggcgctcctgaaggtcgatcccaccagggaggcgattgcctcaaccacgcccgcgcaggttctgcaggcacaggcgcaattgcgcgaggaactgactgccgatccggacccggctttctggggggaggttgcgcttagcagcctcccgtgggcgcctacggtcgatggagcaattcttcctgcccccccaatcgacgccattcgcgcgggcgtggccgcgaacacagcactgttggtcggttcgaataccaaggagacccggctcttcctggtccccagcggagccatagatcgcattaccgaggcctccgtcctggcgctggtggccgcgtacggcctgtcggccggaggcctgagcggctaccgcgcagcacatcccacggccaccgctggtgagctgttctcggaaatccagacggattggtactggcgcatccctgccgttcgactcgcagacgcccacgcggcgaatgcccggatttcgacgtacatgtatgagttcgcgtggcgttcgcctcagttgggaggtcgtctgggcgcggcgcatggggtggagataccattcatcttcgatactttgggccccggagcagaggcgctggtcggcccaacaccgccacagtcgctcgccgacgcgatgcaccgggcctgggttgcgttcgccgtcaacggcgattgcggctggcccacctacgatccggtccacaggtcaacgatgcgcttcgacacgccgtctgccgtggtagacgacccgttggccgtgaggcttgccctctggcacggcgtgccttagtgcgtcgtaccgctggccttccgaacagctccacccgcaacatgtccaagcgcatcgtgatcatccaggggcatccagacccatcgggccagcgcttgctgcatgcgctggcggacgcctacgctcaaggcgcgaccacggcaggacacggcgtacggcgcatcgaggtggcgaagctcgacttcccgctgcttcgcacgcaggctgagttcgagactggcacactgcctcctgcattggagcagccaagggaggacatgcgctgggcggagcattgggttttcctgtttccgctatggcacggaaccatgccggcgctattcaagggttttctcgaacacatctttcggcccggatttgccatggattacaaggagaaagggttccccagacgactgctcgccggccgctcggcacgcatcatcgtgaccatgggaatgccggcgctgctgtatcgctggtactttggcgcatacggagtccgcggcttcgagcgcagtatgctgagtttcgccgggatcaagccgatccgcgagaacctgtatgggcttacctttgccaacgagaggacacgtacccggtggctggaaaacatgcgtgcacatggtgcgcacgggaactgaccggaactcggcagacacatgcgcgctcctgggcggttgccgtcgttgtggtggctccctgccaccgtccgttcatcggccaaacaggcccttcgccttcgggagtctgaatggctcagaagggtcggtggcctaaaccgctcgcgcggtaaccctccggccatcaagagacggtcgccaaccgaagcccaagggctgttgtgcggccatcacggtcactgataacccacggctgagatgccgagtatggcggcttcgcgaagcgatgggcgaggactcgccgcttagggaggatttgttggttgtgacgaacttctaccgactgatgccgtcaacgactgatgctagccccctttggagcagggaccagtccataccgatgacgaccgcgcggtagccgcgtgcgatcatggcatttgccaggtcggtagtcggcgcgacgccgccgagcaaaacccggctctttagaattggggtctcaagttgtgcgattaccgcttgcacctcggggaggtccgtccgcccccggtatcccatgctggtggcaaggtccccgggaccgatgaaaacaaggtcaagtccgggcgttgcgacaatgtcttcaatattgccaatggcatcgacgtgttcaatcgtgccaatggcaagcacctcgccatctgcgcaatccagatattcgcgcatggttagaccccatcgcggcggggcatagaacgggccccagaagcgatctccttcgggcgggtagcggacagcccgcactgccgcctctgcagcggcccgggtcgtcgtcatcggaaagcagacccccaaagcgccgaggtcaagagggaccttggcctgccacgcattggttgccgcaacccggaccagcggcacgagcggggtgccggaagtcgcgcaaatcatcgcgtgagcagtgccggcatcgattgcgccgtgctccatgtcgatgaggacccaatcgagaccggcatgagccatgatctggatggtctgaaccgaaggtatggtcgcgatggcgccaagcgttgcttggccatttcgccacatcgatttcagccggttgattcctttggcggcagggacggtagttgtcatgatggctcctgggcacgggcgccatcgtagtctatgcatctcgtgccggccttgccaaggagacctgttgggtcaaaagctgatgtagaggaaagctgcagtttccgcgaaagggtggcgtcggatatgggcccgcagattctgccgttcagcgcgttgcctcgaacgcctctttggggtcgccttctgtcctatgtggatcggtgcaggacgagcactcggctgtgttcagcgtcgggccgtagtcggccaatttgagtcagtcatcccaacattttgggtgaccgcgtcggccgattcacggcccttcgcgaattaccaagcttcggccggtgtcgggccatgatgtgacattcgtccacgccagcgcgtcgaacgtccaagcgtcgcttctcgcttccaggcggccgtagtgggtgcggcgagtcaacccggttcctggaccggcacgcccgtcaactgttgagtcgcacgcccgctacagaccacccacagtcggcaggaatgatggcgccggtaacataggctgcagcctcgaaggccggaaacaagcgtttgcctgataaagatagtgaacctcggacgagacagtatggcgcgagtcatgtcatgccgtgccctcaacacacgcgcaggccggtcgcagcccgcctacagcaccgtaccccccggcgccggcggcaccgcagccgcctgccaccccccgcccaaggccttgaatgccgcgatggccgcgcgggctgactgcgcttcggcctgcgccttcgcatcggatgtcttcagcaggttctcgtcggcgagcagcacctcgatcaggcggacaacgcccttctcgtaggccgcgaacgacgaattccgcgcctgccggagcgcctgttccccacgttcaagggcattggtctgttcctcgcgcttgaccagcgccgtgaaggcattctcgacatcctccgacgcatgcagcacggccagtcgatagcccgccagcgcctcggcctcctgccccttcgcttggtcgatctgcgccccgatgcgcccgaagtcgaacagtcgccagcgcagcccggccacgccggcagcctggttggcactggccgagaacaggttgccgctggccacggtcgtcgcgctgcccagcagcccgctgagcgagaccttcgggtagtactcggcgatggccgcgccgatgcgggcattcgacgccgccagccggcgttccgccacgatcaggtcggggcgccgccgcagcaagtcggcgggcgtgccggtggcttcgatccgcggcgcggccgggatcgccttgatgtcggcgagttcggcgcggtaggtgcccggctggctgccgagcagcacgtccatcgcgttcagcgcggcgtcgagtccggcttcgagttccggaatggtggcctccacctgcgcgagggcaccttccgcctgctgcacctccagcgcggcggccagtcccttggcgtagagcagcctgacggtcgagaccagcttctgctgcgtatccacctgctgccgcgcgatcgacagccgggcctgcaggccacggatggtcacgtaggtgtcggcggcctgtgccgccacctccacgcgggtggcagccagcccggcctccgacgcctgatactccgcctgcgacgcctcgcgctcccgccgcaggccgccgaagatgtcgatctcccaacttgcggtgaggtcggcctcgtacaggctgccatgccggtcgaagtttggcgttgcattcagcacccggcccagcggcgtctccagggactggtactgcttcgcggcctgggcgctgacggcgcccgagggcagtagcgcggccgtggcgaagcgcagtccggccccggcctgcgtgacccgggcggaggcgaccgccaggttgaggttctggtcgagcgccagccgcacgaagcgcgtcagttgggggtcgccaaacccttcccaccagacttcgagatccgcccgggtggcggcccggcgctgctccacgtcgcgttgcccgaggaagcggtcggcggtgggcacctcgggcttgcggtagtcggggccgacggcacagccggcgagcgccgccagagcagtcacggcggcaacgaggccggacaggtgagtgagcgatcgggaacgggaagggaggcgtcgggaatgcatgggctgccggaataacatggtcgaacttttttcgtgacttgtgaccataatacaaactggtcactctttgtcaatgacgattcaacgtgtaagctcacgacatgaccgatacccaacccaccactccccagccgcgcggtcccgtggaccacggcgtgcgcaaccaaatcgtggaggcggccaccgagcacttcagcctctacggatatgaaaagaccacggtgtccgacctggccaaggccatcggattctcgaaggcctacgtctacaagttcttcgactctaagcaggcaatcggcgaggtcatctgctgcaactgcctcaaccagatgcggcaggccgtggacgaggcggtggccggcgccgactcggcctccgagcggctgcgacgcctcttcggcacgctggcggaggctggcagccggcttttcttccaggaccgcaagctgtacgccattgccgtggtggcctgcgaggaacagtgggcttcggcccgcgcctacgatgcccatatgcagcaactgatcctgcagatcgtgcgcgaggggcgcgagtcgggtgagttcgagcgcaagacgccgctcgacgaaacggctcacgccatctacctcgtgatgaagccctacctcgacccgctacagctccagcacaaccttgacttcgtcgaagtggcgccggcgcagctcagcagcctgatcctgcgcagcctggcaccctgatccctccgagtgtgcgcaggtcctcgggcgcgaaaatgagagtgaccattgactaaattggtcactgttactacagtgaaggccatctgtatggagggccctcatgcttcagcgccgattttccgcatccaccgtcacccacgccgccaccagtgctcctgccttcgcggccatgtgcctcctaccgctcgcacttgcggcatgtagcggcaagccacagcccgatccccgcgtgcaagcgccactggtgagggtggaaaatgtgcaggacgcgtcagccgcccggcgcgccttcaccggcatcgtcgccgcacgggtgcagagcgacctgggcttccgcgtgtcgggcaaggtgctggagcgcctggtcgacactggccaatccgtgaagcgcggccagccgctaatgcggctcgaccccgtcgacctgaagctggcagcacgcgcgcggcaggaagccgtggccgccgccaaggcgcgcgccacgcaactggcggctgacgaggagcgctaccgcgacctcgtggcggccggggcggtatcggcatctgcctatgaccagatcaaggcctccgccgattcggcgcgggcgcagctcagggcggaagaggcacaggccgacgtggcgcgcaacgcgtccgactacgccgtgctactggccgatgccgacggcgtcgtggtcgagaccctcgccgaacccgggcaggtcgtgaatgccggccaggtggtggcgcggctggcccgcgccggacaacgcgaggccatcatccacctgcccgaaaccctgcgcccgccggtaggctccacagcccgcgcgacactctacggcaaggacggcatggcagtcaccgcgaccctgcggcagctttccgacgccgccgaccgccagacccgcacctatgaggcgcgctacgtgcttggcggcgcactgaccgatgcgccgctcggcgccaccgtcacgctgcaggtggccgatccacaggaagcgtcgcaatccggcctgcaggttcccatcggcgcgctccacgatccgggcaagggccccggcgtctgggtgctcaccggcaccccggcgcacgtgacgtggcggccggtcaccgtgcgcgccatcagcgacgatgccgcgaaggtcgagggccagatccagcccggcgaccgcgtggtggcgctgggggcgcacctgctgaacgaagggcagcaggtcaggttggcgtcggaggtgaaggtggccgaagccgccaccgatggtaaaggccgcaaccccgtcaacggcgtgcgggagcagcaatgagtggcttcaatctctcggcactcgccgtgcgcgagcgtgccgtcaccctcttcctgatcatcctcatctcggtcgccggcttcgtcgccttcttccaactcggccgcgcggaggacccgccattcaccgtcaagtcgatgatcttcatcacggcatggcccggcgcgacggcgcaggaaatgcaggaccaggtcgctgaaaagctggaaaagcgcatgcaggaactgcgctactacgaccgcacggaaacctacacgcggcccggactggcgttcaccaccgtcacgctgctcgacagcacgccgccaaaggaagtccccgaggagttctaccaggcccgcaagaagctcggcgacgaggcgcgttccctgccggccggcgtcatcggcccgctcatcaacgacgaatactccgacgtgaccttcggcctcttcgcgctgaaggccaggggcgagccgcagcggctgctggtacgcgaggcggagaccatccgccagcgcctcctgcatgtggccggcgtgaagaaggtcaacatcatcggcgagcaggcggagcgcatctacttgtcgttctcgcacgaccggctggccacgctcggcgtgacgccgcaggacatcttcgccgcgctcaacagccagaatgtgctcacccccgcgggttccatcgacactgacgggccgcaggtcttcgtgcggctcgacggcgcgttcgacaagctgcaacgcatccgcgacacccccgtggtggcacacggccgcacgctgaagctgtctgacatcgccaccgtcgaacgcggctaccaggacccggccaccttcgtcgtgcgcaacaagggcgagccggcgctgctgctcggcatcgtgatgcgcgacggttggaacggcctcgacctcggcaagtcgctcgaagcggaagtagcgaaggtcaacgccgagctgccgctgggcatggaactgagcaaggtcaccgaccaggccgtcaacatcaagtcggccgtcgaggagtttatggtcaagttcttcgccgcgctgatcgtggtgctggtggtgagcttcgtcagcatgggctggcgggtgggtatcgtggtcgcggcggccgtgccgctgacgctggccgccgtcttcgtggtcatggccgcgaccggaaagagcttcgaccgcatcacgctgggctccctgatattggccctcggactgctggtggacgacgccatcatcgccatcgaaatgatggtggtgaagatggaggaagggtatggacggatcgcggcgtcggcctatgcctggagccatacagccgcgccgatgctgtctggcacgctcgtcaccgccgtgggcttcatgccgaacggctttgcaaagtcttccgcaggcgagtacaccggcaaccagttctggatcgtggggatcgcgttgatcgcgtcgtggatcgtcgcggtcgttttcacgccctatctcggcgtgaagctgctgcccgagatgacgaaggtggaaggcggccatggcgccatctacgccacgccgaactaccagcgctttcgtgggctgctggggcgggtcatcgggcggaaatggctcgtggcggcaatcgtcgtcggactgttcgccacgagcgtggtcggcatgggcgccgtgcgcaagcagttcttcccgacctctgaccgtcccgaggtgctggtggaggtgcagatgccctatggcacgtccatcgaacagaccagcgccgcggcggagaaggtggaagcgtggctcgacaaacagccagaagcgaagatcgtgacgtcctatatcggccagggggctccgcgcttctacctggcgatgtcgccggaactacccgacccgtccttcgccaagatcgtggtgcgcaccgacaaccaggaagaacgcgacgtgctcaagggccggctccgccaggccatcgccgaaggcctttcgccgggcgcgcgggtgcgcgtgacgcaactggtgttcgggccctactcgcccttcccggtcgcgttccgcgtcatgggcccggaccccgacaagctgcgcgccatcgcggagcaggtagagggcgtgatggacgccagcccgctgatgcgcaccgtcaacaccgactggggcccgcgggtgccggggctgcactttacgctccagcaggaccggctgcaggcggtcggcctgacctcccacgacgtggcgcagcagcttgaatttctgctgaccggcgtgccggtgaccgaggtgcgcgaggacatccgctcggtgcaggtggtggcgcgcgccgcgggcgacatccgcctcgacccggagcgcatcgccggcttcacgctgatcggcgccaacggcgggcgcgttcccctctcgcaggtcggcacggtggacgtgcgcatggaagatcccatcctgcgccgacgcgaccgcacgccgaccatcaccgtgcggggcgacattgccgacaaccagcagccgcccgacgtatcgaaggccatcctggcgcaactgcagccggtcatccagaagctgccctccggctaccgcatcgagatggccggttccatcgaggaatcgggcaaggcgaacaaggcgctggcgccgctgttccccatcatgctggcgatcacgctgctgatcatcatgtttcaggtgcggtcgatggcgggcatggtcatggtcatcctgacgagtccgctcggcctgatcggcgtggtcccgacgctactgctcttccaccagccgttcggcatcaatgcgctcgtggggctggtggcgctgtccggcatcttgatgcggaacacgctgatcctgatcgggcaaatccagggcaacctgaaggagggactgtcgccgtacgacgcggtggtggaagctaccgtgcaacgggcccggccggtgctactgacggccgtggcggccatcctcgccttcatcccgctcacgcactcggtgttctggggcacgctggcctatacgctgatcggggggacgctcgccggcacgctgttgacgctggtgttcctgccggcgatgtatgcgatctggttccggatccggccgccggcgcaggtggcggtgcaggaggcccccgtgggcgaggtggcggaggtggcgtaagcggcttgcattgcaagcatgcgatggggcatcacttgcgaaattcggatacccaaaaaaaacaaggccctctgcttatggagggccctgctctgattgcactttctcgactttagcgcgacagccagcttggtttttccaaactattgcgccgctttccaaactaaattgtcacgctacagcggatcagccagcgaaattcttgccggcgaagtcccagttcacgacattccagaatgcctcgacgtacttcgggcgggcattgcggtagtcgatgtagtaggcgtgttcccacacgtcgcaggtcagcagcgccttggcgtcggtggtcagcggggtggcggcgttggaggtcgagaccaggtccagcgagccgtcggccttcttgaccagccaggcccaacccgaaccgaaggtgcccacggcggtcttggtgaactcttccttgaacttgtcgaacgagccccacttggcgttgatggcatcagccagcgcgccggtcggctggccgccgccgttgggcttcatcgaatcccagtagaaggtgtggttccacacctgggcagcgttgttgaagataccgcccgacgacttcttgacgatctcttccagggtcgagttctcgaactcggtgcccttgatgaggttgttcaggttggtgacgtaggtctggtggtgcttgtcatgatggaactccagcgtctccttggagatatgcggagccagggcatcatgcgcgtacggcagcggggggagcttgtgttccattgttctgtctctgtgggttggggttgtgggtccggaattggcgattgtaggggacttgcaatacccgcgcaaaccgcgggacaaagcccccagctccgatgttagtttgtcctggcaggggtttccggggggatttccgcccggcttgcctgagcgtttcgcgcccgccgcggcatcgcgaatgggaggcgttcccgggccgcgcaggcgctcagaaatccggcagcttggcctgcacgccggcaatcgccaggtcggccacgcccttggccaggtgcgcttcgaccacgctgcccgcgcggatctcggcgggcgagcgcagcgcgcgtccgcgctggtccagcagcaccgcatagccgcgttccagcgtacgctgcggcgccagcaactcaagcgcgccggcgctgcgcgccaggcgctggccggcgcgctcgtgctggcgcacggcggcggcctgcaggcgttgccacaggcgggccacgtcggcatgggcggcgctggcatcgggacggcacgcgctccagcgcatcgccagcaattgctggcggtggcgctgcgacaccaccgtgtcgcgcaatgccgagcgcaagtgtcgcgccagattgtcgacgcgcgcgcgccgctcctgcagctgcgcctgcgggctgcgcactcgccgcgccagccagtccaggtgctgcgcgcgcaggtccagcccgcgccgcatgcactgcgtgagcgcgtcgcgcgcacgcatcgcctgtgccagcaggtgcgcgcgatccgggctgaccagctcggccgcgccggtcggcgtgggcgcacgcacatcggcgacaaagtcggcgatggtgaagtcggtttcgtggcccactccggagatgaccggcagcgcgcagcgcgcaatcgcctgcgccaccacctcttcgttgaacgaccacaggtcttcgatgctgcccccgccgcggcacaggatcagcacgtcgcactcgcgccgcgcgctggccgcatcgagcatgtcggcgatcttctgcgccgcgcccgcgccctgcaccggtaccggatagaccagcaccggcacatgcggcgcgcgccggcgcaaggtggtcagcacatcgcgcagcgccgccgcctgcagcgaggtgaccacgccgatggtgcgaggatgcgccggcaccgggcgcttgcgctccggcgcgaacagccccgcctgcgccagcttttccttcaggcgcaggaaggcttcgtacaggttgcccagcccggcccggcgcattgcctccacgcccaactgcacctcgccgcgcgcctcatacatggtgaccacggcgcgcacctccaccgcttcgccctcgcgcggctggaagtcgacatgctggttgcgcccgcggaacatcacgcagcggatctgcgcgcgtgcatccttgagcgagaaataccaatgcccgctggcggcgcgcgtgaaattggaaatctcgccgcgcacccaggccagcggaaaactgcgttcaagcagcctggcgattgtgtggttcagctcaccgacagggatgacatcgcggccgctgcgcggcgcggtggaggaagggtcacgcgaaaaattcggcaagtctggcatggcgcactggtggcaagcggcgtgaatgggacatgtccacagcataacctctatgtcaagggggtagcgctgatgccggcggcctcccccgaaaggcgcatgggttcgtgcaaccctttgattcttatgagctttacgcgtaaaacaaaaattaggcaatataaccaattctcttttgcatcaatcacttacaaagtgcccggcaggcttgttcacaaagttatccacagcttctctggataaaacgggccgcaaaccacacttttccagcacaagtggccccaaccccgcttgcggtcccatggaaagcgaccaacgcggcgcgtggcgtatcgcagcgttgccggccgtccgcggcgcagcgtccatgctgcatttgcacaatttctgagcaggaccctgtgaggctataaaaatcaatgggttaaccggcttctcccggatttgtccacaggccgtccacagtgctctccctgcggaatgtggaaaaatccggtttttgtcctgcctgccgccacatcgaccgcgcgctgcactgatacacccctttgcctgttttttaagcaatccatggtgccaccttataaatcaacgacttagatgacctctcaggcagctttccacaagcgctccacaatcctgtcccggcgctgtgtggaaagccgcaccgcaaggtgcgccagcacaccgacgcgcctcctcaggttgtggagagcggtgcctggctgcgtgcaccatgcgccgcagggcttgcggcgggcatttgcacaaaatttaggcaggaacatctttgcccttatggatcaatgtgttagcacgcttgtcaggcggctttccacaatcgatccacaacactgtcccgctttgctgtggaaatggaccggcacgagcgatgcgtggccgagacagcgccgggtgccgtcttgccgtgcgacagggcgcaggttagagtggcgcctgatttttcagagcaatgccggagcgcgcgccgccagcggccagacgcgcatcaaggcatgccgtccaggtggtttggggttttgttattcggttgtcgatcccgggggtccaattgttttccatcattcaagcggccggctggccgatctggccgctgttgctcgcctcggtcatcgcgctggcgctgatcgtcgaacgttttcttaccctcaagcgcagcagggtcctgcccgccaggctctatgaagaggcgctggcggccgcgcagcagcgccgcgccacgccggaagtggtcaacacgcttgagcagaactcgccgctgggccgggtgctggccgccgggctgcgccacgtggtgctgcagccgcacacctcgcgcgatgccgccaaggacgtggtggaggaagccggccgcgtggtcgcgcatgagctcgagcgctacctgaacgcactcggcacgatcgcctcggtggcgccgctgatgggcctgctgggcacggtgatcggcatgatcgagatcttcggcagccagggcggcaccggcgccagccctgaacagctggcgcacggcatctcggtggcgctgtacaacaccgccttcggcctgatcgtggcaatcccggcgctgatcttctggcgctacttccgccggcgcgtggatgactacgtggccgagctggaattccgcgccacgtcgttcctcgacgcgatcctgccgcagcgccgcgcctgatcgccgaacggaacgaacgccatgcacttccgttcccgccagcggcgcgaagagccggagatcaacctgatcccgctgatcgacgtgctgctcgtgatcctgatcttcctgatgatcacgaccacctactcgcgctttaccgagctgcagatccagctgcccaccgccgacgccgagcgcgcccagcagcggccgcaggagatcgtggtgtcggtgtcatcgcgcggggtctactccgtcaacaggcaggtgatggagcagaaggacgtcaccagcctggccgaccagttgcgcgccgcctcgggcaccaactccggtggccagccgccggtggtgatcgtcaatgccgacgcacaggccagccaccaggccgtgatcaacgtgatggaggccgcgcggctggccgggctgtcgcgcctgaccttcgccacgcagagcgcgcagccgcgctgaccccgggcgccgtggcgcatgcggccggcgggcttgccgcatgcgctgtgcaatgcccataatggttgagccgcctgcgcccccagggagcgaagccgcgggcgcactacaatcccatcccaaccaccgactccaccgcccgccgcgcccatgcccgttccccaacatgcccttgccgacttcgtgaccgcccagtggcaacgccgcggctggttcgcgtgggcgatgctgccgttctcgctgctgttcgggctgatcgcgcgggtgcgccgccatggctaccagcgcggctggttcaagtcgacgcggctgccgatgccggtggtggtggtcggcaacgtgaccgtgggcggcaccggcaagacgccggcggtgatcgcgctggcacaagcgctgaccgaggcgggactgcgccccggcgtggtgtcgcgcggctacggcgtggaactcaagcacccgcgccgcgtgaagccgacatcaaaggcgtccgacgtaggcgatgagccgctcctgattgcgcgcgccaccgacgtgccggtctgggtcttccccgaccgcgcgctgtgcgcgcagaccatgctggtatcgcacccgggcgtcaatgtgctgctgctcgacgatggcctgcagcactacaagctgcagcgcgacttcgagatcgtgatgttcgactcgcgcatgggcggcaacggcctgctgctgccggccggcccgctgcgcgagccgctttcgcgcccgcgcgacgcgaccctgatcaacgaccccaacttccgcgccacgcccgaccgccccggcatgtacggcatgcggctggagctggacgatgcctggcagcttgccgaccccaccatggcgcggccggtcagcgcctttgccggccggcgcgtgctggccgcggccggcatcggcaaccccgagcgcttcttcgccagcctgcgcggcgcgggcctgacaccgaagacgctgccgctgccggaccactatgactttgtcgccgacccgttcgtcgaccatcccgacgcgctcgacgccgacgtgatcctgatcaccgagaaggatgccgtaaaatgcgagcgcttcgacgacccccgcatctgggtcgtccccaccaggcccgtgatcgatgccggcctgatcgaaaaaatccgccgcgccgtgctggcgcaaatcaaacccgcgccgaccgcgccggcgaccacgcccggcgccgcagggcgcaacgaggaacaccgagatggacaaccggctgcttgaaatcctggtctgcccgctgtgcaagggcaagctggaatacgaccgcgccgcgcaggagctgatctgccacgccgacaagctggcgtacccgatccgcgacggcatccccgtgatgctggccgacgaggcccgccagtcggtgccgggccgcgcggtcaacccggacggccctgcctccggcaactgagtgcgcgccatgaccgtccctgcgttcactgttgtcattcccgcgcggctcgcttcgacgcgcttgcctgacaagcccctggccgatatcggcgggcgtccgatgatcgtgcgcgtggccgaacgcgcgcatgcgtcgtcggcgcagcgcaccgtggtcgccaccgatgcgcccgcggtggcgcaggcctgcgccgcgcacggcatcgaagccgtgctgacccgcgccgaccacccttccggcaccgaccgcctgtctgaagtggccgcccagctggggctggccgacgacgccatcgtggtcaatgtgcagggcgacgagccgctgatcgaaccgtcgctgatcgacgaggtggcgctgcacctggcgcaccacgccgactgcgccatcgccaccgcggcgcatccgctgcaggacatcgccgaagtcttcaatcccaatgtggtcaaggtggtatgcgacgccgccggccgcgcactgtacttctcgcgcgcaccgatcccgtgggcgcgcgatgcctggtcgggcgtgccggccgtgcccgcggcgctggcacaggtgccgctgcccggcatgccggtgctgcgccatatcgggctgtacgcctatcgggcgggcttcctgcgccgcttcccgacgctggcggcggcgccgctggagcagaccgaggcgctggagcaactgcgcgccatgtggcatggcgagcgcattgcggtgctgcagaccagcgccgcgccggcccccggggtcgacaccccggccgacctggaacgggtgcgcgcgctgtgggcgcagtcgatggcccaggaagggccctgaccaaaccgccggaaagtgacccgcgcgggcgcctgcccgctcaggttcatacagctgcaacctgaaccagggggcggatttcgggccgatttggcgccgcctcatggcataatgcttgccgatacagagccgcccggccggcatgcgcaagcgtgcctccggccaaggctcggtggggagataaagatagagcccgtccggtgtgccgcgccgccatccccctggcagccgccgccggccgtatgcgtgggtacgcctgagcagtgcccgcgctgaacgcagtcagaacgcatcaggaccgcagtaagtcctgcgtcaagttacggcgttaccctccttctgatctcccgccatacagattaaaaactctgaggacccgtaaatgcgtttgatcctgttgggtgcgcccggcgccggcaaaggcacgcaagccaagttcatctgcgagaagttcggcattccgcaaatctccacgggcgacatgctgcgcgccgcggtaaaggccggcaccccgctgggcgtagaagccaagaaggtcatggacgcgggcggactggtgtcggacgacatcatcatcggcctggtgaaagaccgcctcaaggaagacgactgcaagaacggctacctgttcgacggcttcccgcgcaccattccgcaggccgaggcgatgaaggaagcgggcgtggcaatcgactacgtgctggaaatcgacgtgccgttcgacgccatcatcgagcgcatgagcggccgccgcgtgcacgtggcctcgggccgcacctaccacgtcaagtacaacccgcccaagaccgagggcgtggacgacgagaccggcgaggcgctgatccagcgtgacgatgacaaggaagagacggtcaagaagcgtcttgatgtctattcgcagcagacgcgtccgctggtggattactactcggagtgggctgccaagggagatgcctcggccaaggtggcgccgcctcagtatcggaagatcctgggggtgggtaatgtcgatgagattactgcgcgggtgtttgaggcgttgaagtaatcgtttcgactgctcagttttatgcgtcatgaaagcggcctttgggccgcttttgttttggcgattgaatggggtcgcgcctggcagggatggtttctggcttggcgcctagcaaacccaccccttgcacatcccccaccaccccgtaaaataccgccaacgaattgacgtttacgtaaacggcaacaaatacccaatccaaggagacaagcccaaatgcaaatccaaggcaacgtattcatcgtcaccggcggcgcctcgggcctgggtgcaggcaccgcccgcatgctggccgaagccggcgccagggtcgtgatcgccgacctgaacgagtccgccggccaggcactggcaactgaactgggcggccagttcgtccgctgtgacgtcacctccgaagccgacggccaggccgtggtagcggccgcccaggcactgggccggctctccggcatcgtcaactgcgccggcatcgccaccgccaacaagaccgtcggcaagaacggcccgcatccgctggaagccttcgacaagaccatccgcatcaacctggtcggcaccttcaacatgatccgcctggccgccgcagccatggtgcaaaacacccccgacagcgaaggcgagcgcggcgtgattatcaatactgcctcggtggcggcctttgacggccagatcggacaggccgcctatgccgcatccaagggcggcgtggtggcgatgacgctggcgatcgcgcgcgacctgtcgcgcgacggcgtgcgctgcatgaccatcgcccccggcatcttcgaaacgccgatgctgctgggcatgccgcaggaagtgcaggacgcgctcggcaggatggtgccgttcccgccgcgcctgggccgcccggctgaatacgccaagctggcccgctcgatcatcgagaacaccatgctcaatggcgaagtaatccgcctggacggcgcgatccggatgcagcccaagtaaagccccggcgctgcccgctcagccgggcagcagcattaccagcatcaaaccgggcgccgccgccggcaccagcgtcagctgctcgaactgcagcgcgccctgctgcggatggtgaaagccgcggcggccgccctcgcggtcttccacgtcctgcgacaaccaggcatcgcggaaggccgcgctctcagccatcagcccctcgatcaacgtacgcgtcggcgcctcgtccgcatggcggatgctgtgcgcgcggaattccgccaccagccgtgccgcgcggtgcggccagtcttccaccagcgccatcagccccggcgacacgaacatcgcgcgcagcaggttgcgctcggcgctggcggcatcgagccagccgataaacaggtccgcggcggcgtcgttccaggccagcgcggtccattgccggtcgagcaggtaggccggcccgccgatggcatgcacgctggccagcaccaccggcggcacggtttcgtccgcggcctgctgcgggtcgcggcggcccgccagttcgaacaggtaggcgcgctcggcgcgcgacagccgcagcgcggcagccaggctggccagcgcgcgtgccgacagcgataccggccgcccctgctccagccacgtcacccaggtcgcgctcaagcccgccaattgcgcgacttcctcgcggcgcaggccgggggtgcggcggcgccggcccggtgcgagcccgacatcggccggcgccagccgttcacggtgcgcacgcaggaaagcgcccagcacggattcgcgcgacgatggcgatgcagacgggacaacagcgggatcggcagacaagggcatgacaggctggtgccgcttataccaggataaatcggtaacttgtaccgggaaaactgcccgcctacagtatgccgaacccgcctcgcgggcaagtcccctcccccaacaaagaaggccgcccgccgatctgggcgtggcccaaggagcccagcaccatgcaacagcaggaactcgtcgccgcccagttcggcgccaccgccagcgcctacctcaccagcgccgtccacgccagcggcgcggacctgcagcaactgaaagacgaactggccgcgctgatccccgcagccaaccgcccgcgcagccgcgtgctggacctgggctgcggcgcgggccatgccagcttcgccgcggcagcgattgcgggcgaagtgacggcttacgatctgtcggcggacatgctggctgtggtcgaggccgcggcgcgcgagcgcgggctggccaatatccgcacgcgccagggcgctgccgagcagctgccgttcgacgatgccagcttctgcgcggtggtctcgcgcatgagcgcgcaccactggcgcgacgtcccgtcggcactggccgagatccggcgggtgctcaagcccggcggcaaagtggtgctgatcgatattgccggtgcgccggatccgctgcgcgatacctggctgcaatcggtggaactgctgcgcgatccctcgcacgtgcgcgattacacgccggcggggtggcagtcgatgttcgaggcggcaggctttggcgccgatggcatcgccgtatcggacatctggcgcatcggcatcgagttcgacagctgggtcaggcgcatgcgcaccgcgccggtggccgtggaggccatccgccacctgtggcagatggcgcctgcggaagtgcgcgcgcactatcgcgtacaggccgacggcagctttgaactggaagcggtgatggtcaccgcgcgttgacagagtgtgaccgggtcaggccgcggcgctcattgcgggcgcctcggcgcgcacggtcaggcggcgcaccaggtcccacaccgccgccgcggccggcgacagtgaacggtcctcgcgccggaccatgacgatgctgcgctcctcgcacggcaccagcgggcgccacaccagcggcgacgccgccggcagcggcagcgagaacgacggcagcaccgatgcgccgatgccggcctcgaccatgccgaacacgctcgccgagtggcccagctcctgcaccaccagcggcaccacgccatgccggccgaacacgcggtcgatcagcggccggctgccggaggcaaagtccagcagcaccagttgcattccatgcagcgccgcccatggcaccgaaggcgactgcgccagcggatggtcgcgccggcagacaaagcagaacgggtcggtcgccaccggctccaccaccagcccgtcgcgcaccagcggatcgatcagcacgccaaagtccacggcgccggcgcgcacctgctccaggccgtcggcctgcacgttgtcacgcacggtcaggcggatctcggggtactgggcggcgcaggcggccacgtacagcggcatcagccgggccgagatcgtcggcgcaccagctatcactacgcgaccgcgatagcgttcaccaagctggcgcgtctcttccagcgtgtcgtcgagctgcccgagcagccgctccagcgctggcgccagcgcgtggccggcctcggtcagcaccacctcgcgcgtggtgcggtccagcaggcgcacgccaagtgcctcttccagctcagccacgccgcggctgaccgcaggctgggtcaggccgaccacatcggcggcccggctgaagccgccggtattggccacggccaggaagacgcgcaactggcgcagtgtgtaattcatgcaacggccggataaatagattctataaatgaatttgcattctagacttggctggcgtccaatactaggcaaaaccctaacatcgcaggatccacccgcagtcatgtctcgcattgtccgcaagctcaagaaactttatgacctgatcgaccgcttcgttctcgtcatgttgacggccatcgccattgcgctggccgcccctgaaatcggcgccggcgacggcccgctgcacctgggcgtggtgaccagcctgggcgtggcgctggtgttcttcctgcacggcgcggcgctctcgcgcgacaagctggtgttgggtgccaagcactggcgcctgcatgtgttcgtgcagaccttcacctacgtggtgttcccggtggtgggcgtgctgctgatgctgtcgctgcgcaatacgctgccgccggacctgctgctgggcgtgttcttcctgtgcgcgctgccgtcgacggtatcgtcgtcggtggccatgacctcgatggcgcgcggcaatgtgtccggagcgatcttcaacgccaccatctcgggcctgatcggcatgctggtcacgccgctgctgatggggctggtgatcagcgccagcggcgcctcgatgccgctgggcaaggcgctcaccggcgtggcgctgcaactgctgctgccgttcgcgctggggcagatgctgcgtccgctgatcggcagctggctggcgaaaaagaagcacatcaccaacaagatcgaccgcggcgtgatcgtgctgatcgtctattcctcattctgcgatgccaccgcccagggcctgtggcaccagtaccagtggcagaccatcggcgcagtgatgctgatcgccgcggtgctgctgttcgtggtgctgggctttaccacgctgaccgcgcgccgccttggcttctctgtcgaggacgagatcacggcggtgttctgcggctccaagaagagcctggccaacggcatcccgatggccaagatcctgtttgccggccatccggcgctgggcctgctggtgctgccgctgatggtctatcaccagctgcagctgatcgtgtgctcggtgatcgcgtcgcgctatgccgaccgcgatgccttgcaggaggaccaggccgcggcgcgggcctgaggcacgcagccatgaaaaaaccggggcatgccccggtttttttgtgcccgccagactcacactgacggattcttcgacagcggcggattgcgcgcgaagtacgaccggatccccttcaggatggcattggccagctgctcctggtgcgcgttatcgttgagcttgcgctcttcttccggattgctgataaaggccgtctcgatcaggatcgacgggatatccggcgccttcagcaccgcaaacccggcctgctcgacgctgcccttgtgcagcttgttgatgccgccgatctcgcccagcacggccttgccgacctgcaggctgtcattgatctgcgcggtggtggacaggtccagcagcacgcgcgccacctgcgcatccttgttgcccatgttggcgccgccgatcaggtcggaagcgttttccttgttggctagccagcgagccgcggtactggaggcgccgcgctcggacagcgcgaacactgacgcgccgcgtgcctcgggcgacaggaaggcatcggcgtggatcgatacgaacaggtcggcctgcacccggcgcgccttctgcacgcgcacgttcagcggcacgaagaagtcggcgtcgcgcgtcatcatcgcgcgcatattgggctgggcatcgatcttggcgcgcaggcggtgcgcgatctgcagcaccacgtctttctcgcgcgagccggcggcgccgatcgcgcccgggtcttcgccgccatggccgggatcgatcgccacggtcagcaggcggcgcatcttgaagggccgttcggcagtgggattgtcgcgtgcgaccggcggcaccaccggggcattggggctcggcaccggcggtgccgacggcctgggccgggccgaggccaccggcggcggcagcggcgcggtggtgggcggcacctcgcccttctcgtcgaagcggcgcaccagcgcgccgatcgcgtcttcctcggcaccggccggcgcgccggcgatgccatcgttgcccggcgccgggtccgaggtggcgaagcggcgctgcttttcctcggtgtcgcgcaccagcttccacagcggatcgggcggattgaccgggtacaggtcgaacaccaggcggttgcggtagctgccgatcggcgccagcgtgaacacctgcggcgccacgttttccttcaggtcgaacaccatgcggaccacgcgcgggcggttctggccgacgcgcacggtctggatataggggtcgttcggggtgatcttggccaccagctcgcgcagcgtgggcgacaggtccaggccgtcgatgtccaccaccagccggtcggggtcgcggatcatctggtgcacggcggccagcggggaatcggattcgatggtgacgcgggtgtagtcctcggccggccatacgcgcaccgcgacgatgccggcgccaaacgcgatctgcgggccggccagggtcagcacggccgtgcccgcgcccagcttcagtgcctgcgccatccatttgcggcgcgcctgcagcaggccgtcgggtccatcggggcggtcggtggcaagtcgcttgatcagcatgcgttcagcagggtaagtccagtgtgagtataggcgcgcatcgtcgcgatccgccgctcgccggcatcatccgccccggccatgtccgattggagcaacatatggagatccggttccccgagcaggcggccggccttttccggccactcgaccaggttgaaggccggttcggcgaagcagtcgcgaaaacccgcgtcgatccactcttcgggatcggcaaagcggtacaggtcgaagtggtagacggtcagcggcgagccgtcggcgcgggccacctcgtagggctcgcacagcgtgtaggtggggctgcggaccttgcccgcatggccgagcgcgcgcaggatcgtgcgcgtcagcgtggtcttgccggcgcccaggtcgccggacagctgcacatgcaccgtgcgcggcggcatggcctgcacggcggcggccagcgcggcgcccaggcgcgcggtggcggcttcgtcgggcagcgtcagggtgcgttcttcgagcaagggcattgcgtacaattcagggatgatcgaccgagtcgccccagggcaggcagatgcgccacctacccccgttcccggcaccgccgcccacctggccgcgggccccggggaacttgcggcactggccgcgtcgatccgcgcatggggcgcggaactgggctttgcctcggtgcgcatcgccgatgtcgacctcagtcatgccgagccggggctgatggcgtggctggcgcagggctaccacggcgacatggattatatggcgaaccacggcctgcggcgcgcccggccggccgaactggtgcccggcaccgtgcgcgcgatcgtggcgcggatgccgtaccttccggctgccggcgcgcaggccggcgccaccgactggcgccggcacgagctggcgcggctggacgatccggccacggcggtggtgtcgctgtatgcgcgcggccgcgattatcacaaggtgctgcgcagccgtttgcagcagctggccagccggatcgaggccgaaatcggaaaattcggctaccgtgtctttaccgattccgcacccgtcatggaagtggcgctggccagccagggcgggctcggctggcgcggcaagcatacgctgctgctggaccgcgacggcggctcgatgttcttcctgggcgagatcctggtcgacatcccgctgccggccgacgcccccgagtccggccactgcggcaactgccaccgctgcctggacatctgccccacgcgcgccatcgtggcgccgtaccggctggacgcgcgccgctgcatctcctacctgaccatcgagcacaagggcccgattccggtggagttccgcgcgcccatgggcaaccgcgtctacggctgcgacgactgccagctggcctgcccgtggaacaagttcgcgcatgtggccatggtgccggacttcgacgtgcgcaacgggctcgacgcgcccgacatggtggcgctgttccagtggaccgaagcggaattcaaccagcggctcgaaggcagcccgatccgccgcatcggccatgagcgctggctgcgcaacctggctgtgggtctgggcaacagcctgcgcgcggcgctgtcgggcacgcgcgccgaagacgcggccctggccgcgcgcatccgcgcagcactgctggagcggcgcgagagcgccacgccgctggtgcgcgagcatatcgactgggccctggcccagggcggcccgccgccggactagctgaccagcgccagccacagcggcgtggtcacgatcgccgccaccgtcatcagcgaaatcgtcgccgccaccatcggcccgttgccgcccatgcgcaccgccaggatatacgcgctggaggccgtgggcagcgaggcatacagcaccacgatctggtactgcagcgcggtcagcggcaggtgccgccccaccagccaggccacgcacggcatcgccagcagcttgaccccggtccaccaggccaccggccccgcggtgccggtggcaccgctcatctgcagcccggcgcccaccgtcatcagccccagcgcggtcgaggccgagcccagccggttcagcgtcatgcccagcacctcgggcgcatgcagccccatcaggttggtgagcaggccgccggcagtggccaggatcagcgggttgcgcgccagctctttccacagcgcggtctggccgtgccgcgccagcgcccacaccgccgccacgttgcacagcggcaccgtgcagccgacgatcaccgccatcagcgccagcccctcggagccgcccaggcgcgaggccagcgccagcccgatataggaattgaagcggaacgcggtctgcaggcccgaggcaaagctcagcgcatccggccgcaacacccatttgacggcgtagccgccggccatgccggtggccatcaccagcagcgccagccccagcatggccgaggtcgacgagaaatccagcaccgcggtattggtcgactgcagcagcagcgccgggaacagcacgaagtagaccaggcgctccaccccgccccagaaggcacggtcgaacggggtataccgcaccagcagccagccgatgaggatcaggctgaagtccgggaccagcaggagagcagaagacatttatcgttgttttggtggcggtggcatgacgcggcagctgccctgcgggccgtcgcgcgggattgcggcggcggtggcggggggtagataacggcaaaaaaccgtaatgtgcggactagggcagatacggataggtatttttccagatttaggccagcatggcatgccaagttgtacgcctgccgccatgttgtcccgcacccggtccgcgccgtcgcgcccggacacccacctccgagcccccttccgccctggtctgcacccgggccgctgcctgcgcctggccgccgtgctggtggcgctgtgcgccgccacggccgcgggcgccgtaccggtgccggcacgctcggtggaaatcgaagggatacgttttgacgatgcggcgcgcgtgggcggcaaggaactgcagctcaacggcaccgccctgcgcgcgggcttcctggccaagggctacgtggccgccctgtacctgcaggagaaagcccgcaacgcggccctggtgctgggcacgcccggcgcaaagcggctacagttgcgcatgctgcgcgagaccgaaccgccggacgtcgtgcgcgccatccgccagggtatccgcaacaaccacagcgagcagcagatgcaggggctggccacgcggctggtacagttcgagcgcaccctgggcgaggtcggcaccgcgcacaagggcgacgtgatcaacctggatttttccccgcagacggggaccgtcatcgccatcaacggcacgcctcgcggccggccgatccccggcgaagacttctaccaggccgtgctgcgggtcttcctgggcgagcgcccggtcgacgccgaggtcaagcgcgggctgctgggcggctgacacaattacgctgccggcgcacggccccacctgtggcacggcgacggcttcttttcttccgggcggcaccctgcccggatttcctgacgggagacatgatctcatgcaagctggcaaactcgcactgaccctggccctggccgccgccgccaccgcggcgcaggcccagagctaccccaccaagccgatccgactgatcattccgttcgcacccggcggcaccaccgacatcgtcggccgcggcgccgcggaccagatgagccgcatcctgggccagcccgtggtggtggagaaccgcgccggcgggggcggttcgatcggtgccgacgcgatcgccaaggccgcgccggacggctacaccatcggcatctccacggtctcgaccatggccgtgaacccggcctgcaaccccaagctgtcgtacgacccgatcaaggacttcaagcccatcaccaacctggccaacgtggccaacgtgatcgccgtgaacccgagcttcccggccaaggactacaaggagttcctggccgtgctgaaggccaacccgggcaagtattcgtacgcctcgtcgggcacctgcggcttcggccacatgctgggcgagcagttcaaggtctcgaccaagaccttcatggtccatatcccgtaccgcggcgcgggcccggcgctgaacgacgtgctggccggccaggtgccgatcatggtggacaacctgccctcttcgatcccctacatcaaggccggcaagctgcgcccgatcgtggtggcctggaacaagcgcctggaatccatgcccaacgtgccgaccttcggcgaaatgggcctgaaggagccgaacgacccggcctggtacggcctggtggcgccggccggcacgcctgacgacgtcatcaagaagctcaacgaggccgccgtcaaggccctgcaggacaaggacttccagcagcgcctgcgcaccgccggcgccgagccgtcgggcaacacgccggcgcagcatgcggccgagatcaagaaggaattcgacaagatgaagaatcttgtgaaggtgcagaacatcaagctggagcaatgatccggccggtgtgacgccacccgcaaagggccgccgcgaggcggcccttttttcttgcccgcgccaaaaagcactaaaatccagcattcgccccagcctgaccgccatgcccgccacctatgacgccatcctccccgcccccttcggcaagatcggggtgcgcacggacggcgcgcgcatccgggccatcgtgtaccttcccgggcacgtcgaggcgcgcgccccggcggacgcgctgacgcaacagctcgcggcgcaactggaggcctactacgccaaccccgacgccgccttcgacctgccgctggccccggccggcagcgacttccagcagcgcgtgtggcaggccatcagcgcggtgccgcgcggcgcggtgaccacttatggcaccatcgccgaggccatcggcgcgatgccgcgcgcggtgggccaagcctgcgggcagaacccgttcccgatcgtgatcccctgccatcgcgtagtctcggcgcgcggcatcggcgggttctcgccccatgccgaagacggcttctacctcgacgtcaaacgctggctgctgcgccatgagggcgccatgctgatatgagcggcgccgcccaggcacctgacatcgccgccgcgcccagcgacgccgacgtggcactggtcagccgcttctgcgacgcgctgtggctggaagacggcctctcgcgcaataccatcgatgcctaccggcgcgacctgacgctgctggcgcgctggttgcagcatgagcaccgcggcgagttgccgggcgcggacgacggcgcgctgtcggcctacttcaacgcacgccacacgcagagccgcgcctcgtcggccaaccgtcgcctggcggtgttccgccgcttctaccagtgggcgctgcgcgaacacctggtcgaagccgacccctgcctgctgctgcgccccgccaagcagccgccgcgctaccccaagaccctgaccgagtcccaggtcgacgcgctgctcgaagcgcccgacaccgacacgccgctggggctgcgcgaccgcaccatgctggaactgatgtacgccagcgggctgcgcgtgtcggagctcacgcagatgaagaccatcgagatcggcctgaacgaaggcgtggcgcgcgtggtcggcggcaagggcgacaaggagcggctggtgccgttcggccagcaggccggcgactggctgcgccgctacctggccagtgcgcgccccgcgctgctggccgggcgcgcctgcgacgcgctctttgtcacgcagcgcggcgaaggcatgacgcggcaggcgttctggcacctgatcaagcgccatgcgcgcgatgccggcgtgcacgcgccgctgtcgccgcacacgctgcggcacgcctttgccacgcacctgctcaaccacggcgccgacctgcgcgtggtgcagctgctgctgggccacgccgatatttccaccacccagatctatacgcacgtcgcccgcgaacgcctgcgcgagctgcaccagcagcaccatccgcgcggctgaacaagcgggcggcgaccactgtcatgagcaagaccaggcacgtatcagaaacccccgcgacgcagtacctgcgcaagcatggcgtcgccttcggcgagcatccgtatgactatgtcgagcacggcggcaccggcgaatcggcgcgccagctgggcgttcccgagcacgacgtgatcaagaccctgatcatggaagacgagcgcgcgcagccgctggtggtgctgatgcacggcgactgctcggtctcgaccaagaacctggcgcgccaggccggccgcaagagcgtgcagccgtgcaagcccgaggtggcgcagcgccacagcggctacatggtgggcggcacctcgcccttcggcacgcgcaagcgcatgccggtctacgtcgaatcgaccgtgctggagctggcgcgcatctatatcaacggcgggcgccgcggctacctggtcagcgtggacccgaagctgctgcccatgctggtggacgcccagccggtgcaatgcgcactgcctgactgagagcccccgcacaaaccgaggcaagcctcgatgccaatccggaaagtcacggacgtagcgaggcccctgccgcgctacaatcgcgccagcctgaaaacaccccactacacatggccaatctgctattcgccctcgccgcctacctgatcggctccgtttccttcgctgtggtcgtcagcaagctgatgggcctgccggacccgcactcctatggctccggcaatcccggcgccaccaacgtgctgcgcaccggcaacaagaaggccgccatcctgacgctgatcggcgatgccctgaagggttggctggcggtatggctggccgcgcgcttcgggccggcctacgggctgaacgaaaccggcctggccatggtggcgctggcggtcttcctggggcacctgttcccggtgtaccaccgcttcgccggcggcaagggcgtggccaccgcggccggcatcctgctcgccatcgacccgatcctcggcctgggcacgctggccacgtggctgatcatcgcgttcttcttccgctactcgtcgctggcggcactggtggcggcgatcttcgcgccgttcttccatgtgctgatgaacggcgtggatgtgatgacgggggcgatcttcgtgatcagcgtgctgctgattgctcggcaccggcagaatattgccaagctgctggccgggaaggaaagccggatcggggagaaaaagaaggtctgaaaacggcctgaggcagccctgacgccggctcaggcctcggctgccccgaacagcatctccacccggaacccgccaccatcggcattcaccaggttcagcttcccacccgcctgccgcaccagccggtccacgatcgccagccccagcccggaatgcgcattgccgccccgggccgggtccagccgcacaaagggcagcgtggcgcgttccttgtcatcctcgggaatgccggcgccctgatcctccaccaccagcaggtaaccctccggcgtgcgcgcggtcgcgatgcataccggcggcttgccatacgcgtaggcgttgtcgaccaggttgccgacgatccggtccagctgcgtggcgatcatgcggaagccctcgcccgcgcccagcgacagcaccacctggcgctcctgctcggccagcgacgcggccagctcattgacgcgccggtccaccggcaccgggcgcgcggtcgactcgctggtctgcgcgaagctcaggaactgctcgacgatggccgacatggactcgacgtcgcgcgtcacccccgcggcggccttgggatcggccagcatctcggcgcgcaggcgcagccgcgccagcggtgtcttcaggtcatgcgcgatgccggccagcatggtgttgcgctcctggtcgatgcgcgccaggtcggccaccatgcggttgaaacgctcgatcagctggcgcagctcatgcgggccgcgctcgcgcagcggcggcacggcgtgctggcgcgacagcagctctgccgcattggccatgtcgcgcaccggccgctggatctgccaggcgatcagcacggcaaagacgatggccacgcccaccaccagcatcacgccaggcaccagccggttgtcaggcggcggattgtggacccagaggatcggcatggcgatccagcgggcccggctgggcagcttgatccagatgcgcggcgtggtctcgtcctccagccggatctcggtgccctgcggcagcctgccgatgaactgctcgaccagccggcgcgagcgcccgcccttgggcacgacggcatgctcttcggcgtcggccgtgttggctgtctcaaccaggctgggcagcttcgccggcggacgcgcgtcgagcgcgcgctcgatgctgtcgagctggaacagcatctgctcgactgaatagtccacctgctgctggcggcggtccatgcgcaggatggccagccatgagaaatggctgatcacaagcacggcggcaatcagcagcgcaatgcggccgaacagggtgtcgatacgtcgcaacttcatcggaaagcaggctctggtggcatgcggcgccagggggcgggcgccgcggccattattcggggagtcccgcggacatctcttccgcttcgtcgggcacgaaggtatagccgcgcccgcgcacggtctggatatagcgcgggcgctgcgcgtcttcatcgagcagccggcgcaggcgccagatctgcacgtcgataccgcggtcgctgatgccgctggcgctgccgtacatcagctcgacgatgcgctcgcgcgacagcacttcgagcggatgcatcagcagcagcttgagcagcgcgaactcggtatcgctgatcgacagcgtctggccggcacggcccagcgtgcgctggcggaaattgacgcggaacgggccgaaggcgaccgattcgcggtcctcgggcgcggccgcggggcgtgccagcttgcggcgcagcacggcgttgatgcgcgccagcagctcgcgcggcgagaacggcttgccgaggtagtcgtcggcgccgatctcgagcccgacgatgcggtcgatctcgtcgctgcgggccgtgagcaggattacggggatgtcgtcgttcttggcgcgcaggttgcgcagcgcggtcaggccgtcgaccttgggcatcatcaggtccagcacgatcagcgccgggcgctcgcgctccaggcgcgcctgcaggccgtcgccgtcatgcatcaccgagacggcaaagccctgctgggtcaggtactcgcgcagcaggtcgcgaagttcgggatcgtcgtcgacgacgaggatctgggtaggctggttcgttcgcataggcacatgatagtcagccccggcgccacacatgccggtttggccgggcggttttgtttccggaggttacacccggggcgctggtaatccgctgtaataaaagcgccgggcgccgaaatacgggcgtccgggcccgcacattatccttgcggcatgacgtgccaccggcgccgccgcattgcgcgccacacggcacttgccggcctgccggccacccgcggcgtgcccctccacgcggcgggccggcgcccgtggcgttgcggcatactgctgcatcgtcacttgccagaccgaacattgcaggcgcgccgcgcgcgccgcccccaggatttgcggacatgtccaaccccgaacaaggccagcctaccccctccccgaccccgtcttcgcctgcgcccgagggcactccgccgcggcgcaccggccggcgccggctgaccgccggcgtgctggtgctgctgctcgcggggggcgcctggtactggtacgcccatcgcggccaggcgccgcaggagacggccggggctgcaggcgcgcagcggggcgccagcggcccgggcgcgcggggtggcgccggcggccccggcatgccgcgctcgcccgtggtggtcgccaccgtggccaagcgcgatatggatgtggtgctcaacggcctgggcaacgtgaccccggtgtccaacgtcaccgtgcgcgcgcaggtgtccggcccgctgctcaaggtgctgttcaaggaaggccagatggtcaaggccggcgacgtgctggccgagatcgacccgcgcccgttccaggcggcgctggaccaggccgtgggccagctcgcgcgcgaccaggcactgctgcagaacgccaggctcgaccagcagcgctaccgcaccctgctgggccaggactcgatctccaagcagcaggtcgatacccaggacgcgctggtgcgccagtacgagggcgtggtcaagaccgaccagggcaatgtcgccaacgcgcgcctgcagctgggctataccaggatcgtcgcgccggtgtcgggccgcatcggcctgcgccaggtcgaccccggcaatatcgtcaataccagcgacaccaacggcatcgcgctgatcacgcagatccagcccatcgccgtgatgtacaccatccccgaggacaacctgccctcggtgctgaagaagctcaacgccggcgaagaacttccggtgcaggcgtgggaccgccaggtgcgcaaccagctcggcgaaggtacgctgctgaccaccgacaaccagatcgacaccaccaccggcacggtcaagctcaaggcggtcttccccaacgccgacggcatgctgttccccaaccagttcgtcaacgtgcgcacgcgcgtcgatacgctcagggacgccaccgtgatccccgtggcggcgatccagcgcggccagcagggtaccttcgtctacaccgtggatgacagcagcaaggtcaaggtgcaggtggtcacgctgggcccgggcgacggcagccgcaatgccgtgctcaagggcctggagcccggccagcgcgtggtggtggacggcgccgaccgcctcaaggaaggcatgacggtggaggccgtcgacccggccgcgcgcgccgccgcggtggtgccggccagccagccgcgcgggcgcggccgccgcaaccgggacggcggcggtgccagcggcgcgcacgccgacgccagcggggccgcggcccccggcgcggccggcgaacatcgccgccaccgccaggccggcgccagcgccccgcccgccggcggcgcgcagcagtaaggacagcgcatgaacccctcacgcctcttcatcgagcgcccggtcgccacggcgctgctgatgctggccatcttgctgtccgggctggtggcgtaccggctgctgccgctgtcggcgctgcccgaggtcgactacccgaccatccaggtcactacgctctatcctggcgccagcccggacgtgatgacctcgtcggtgaccgcgccgctggagcggcagttcggccagatgccgggcctgaagcagatgtcgtcgtcctcgtcgggcggcgcttcggtgatcacgctgcagttcgagctgacgctgccgctggacgtggccgagcaggaggtgcaggccgccatcaacgccggcagcaacctgctgccatccgacctgccgatgccgccggtctacagcaaggtcaacccggccgacgcgccgatcatgaccatcgccatgacctcggacaccatgccgctgcccaggctgcaggacatggtcgacacgcgcgtggcacagaagatctcgcagatccagggcgtgggcctggtcaccatcagcggcggccagcgccccgcggtgcgcatccaggccaacccggccgcgctggcttcgctgggcatgtcgatcgacgacctgcgcaccgccattggcgcatccaacgtcaacggcgccaagggcagcttcgacggccccgcgcgcgcctccaccatcgacgccaacgaccagctgcgctcggccgacgaataccgccagatcatcctgggctacaggaacggcgcgccgatccgcatcaccgacgtggccgagatcgtcgacggccccgagaacagccgcctggccgcctgggccaacgacaagcccgcgatcgtgctgaatatccagcgccagcccggtgccaacgtgatcgaagtggtggaccgcatcaaggcgctgctgccgcaactgcagaatgcgctgccggcctcggtccacgtgcagctgctgaccgaccgcaccaccaccatccgcgcctcggtcgaggacgtgcagttcgagctgctgctggcgatcgcgctggtggtgctggtgatcttcctgttcctgcgcaatataccggccaccatcatcccgggcgtggcggtgccgctgtcgctggtgggcaccttcggcgtgatgtacctggccggcttctcgatcaacaacctgacgctgatggcactgacgatagccaccggcttcgtggtcgatgatgcgatcgtgatgatcgagaacatcatgcgctacatcgagaagggcgattcgccgatggcggcggcgctcaagggctcgaaacaaatcggcttcaccatcatctcgctgaccttctcgctggtggcggtgctgatcccgctgctgttcatgggcgacgtggtcgggcgcctgttccgggaattcgcgatcacgctggcggtgtcgatcctgatctcggcggtggtatcgctgacgctcacgccgatgatgtgcgcgcgcctgctgcaccatgtgccggaagagaagctgtcgcgctttcaccgcgccagcggccgcttcttcgacaacgtgatcgagcgctacggccgtgcgctggagtgggtgctcgatcgtcagaaagcgacgctggtcgtggccgtggccacgctggtgctgaccggactgctgtatctgctggtgccaaagggcttcttcccggtgcaggacaccggcgtgatccagggcatcaccgaggccgcccagaccacctcgttcgacgccatggcgcgccggcagcaggccgtggccaaggtggtgatgcaggacccggcagtggcaagcctgtcgtcgttcatcggcgtggatggcaccaacaccacgctcaacgccgggcgcatgctgatcaacctcaagcccaagggcgagcgcgaccccatcgacgtggtcacgcagcgcctgcagcaggccgtgcacgaactgggcggcgtgtcgctgtacacgcagccggtgcaggacctgaccatcgaggacaaggtctcgcgcacgcagtaccagttcaccgtcgaggaccccgatcccgccacgctggccgcgtgggtgccgaagctggtggaacgcctgcgccaggaacccgagttgcgcgacgtcaccagcgaccagcagaacaacggcctgcgcgcctatgtcgatatcgaccgcgacgccgcggcgcgcttcggcatcaccaccgcggtgatcgacagcgcgctgtacagcgccttcggccagcggctggtgtcgaccatcttcacgcagtcgagccagtaccgcgtggtgctggagaccatgccggaattccgcaagaatccgcagtcgctggccgacctgcgcctgccctcctcttccggcggccaggtgccgctgggcgcgttcgcgcgcatcaccgaacgcaccggcccgctggtgatcaaccaccagggccagttcccggcggcgacgatctcgttcaacctggcgccgggcgaatcgctgggcgccgcggtcgacaagatcaccagggtcgagcaggagctgggcctgccgatctcgatgcagaccagcttccagggcgccgcgctggccttccgcgcgtcgctgtcgaacacgctgtggctgatcctggccgcggtggtgacgatgtatatcgtgctgggcgtgctgtatgaaagcaccatccacccggtcacgatcctgtcgacgctgccatcggcgggcgtcggcgcgctgctggcgctgctgttggcggggcaggacctgggcatcattgcgatcatcggcatcatcctgctgatcggcatcgtcaagaagaacgcgatcatgatgatcgacttcgcgctcgaggcagagcgcgagggcggcatgaaaccacgcgatgcgatcttccaggcctgcctgctgcgtttccgcccgatcctgatgaccaccatggcggccctgctggcggcgctgccgctgatgctgggttccggcatcggcagcgaactgcgccggccgctgggcgtgaccatggtgggcggcctgctggtcagccaggtgctgacgctgttcaccacgccggtgatctacctggcgttcgaccgcgtggccacgcgcgtgaaaggctggcgcaagcggcgcttcggtgatccggaggaaggcggcacgggcgaggagccggtgtaacgatgaatctctcggctgccttcatccaccgccccgtcgcgaccgcgctgctgacgctcggcatcctgctggcggggctggccgcgctgcggctgctgccggtgtcgccgctgccgcaggtggacttcccgaccatctcggtatcggcgtcgctgccaggcgcgagtcctgaaacgatggccgccaccgtggcgacgccgctcgagcgcgcgctcggcaccattgccggcgtgaccgagatcacttcgagcagttcgctcggctccacccgggtgacgctgcagttcgacctgtcgcgcaatatcgacggcgccgcgcgcgacgtgcaggcggccatcaacgcctcgcgcgcgacactgccgaccagcctgcccaacaacccgacctaccgcaaggtcaacccggccgatgcgccgatcatgatcatcgcgctgacctcgccgaccatgacgcgcgggcagctgtacgacgcggcctcgaccatcctggcgcagaagctgtcgcaggtcgatggcgtgggccaggtcaccatcggcggggcctcgctgccggccgtgcgggtcgagctgaacccgaccgcgctgaacaactacggcatctcgctggaggatgtgcgcaacaccatcagcgcgaccaacgccaaccggccgctgggcacgctggagaacgccgccagcaactggcaggtctacgccaacgaccaggcgatgaaggcggaagactacatgccgctgatcatccgctatgccacgccgggaaccttctcgtcgacgtcggcgggcgcgctgattgccagcaccgccaacgccgccgccagcggcggcgtcagcaccaaggtggtcaacggcgtgaccgtgaccacgctgaccaccagcagcggcaccaccaccatcaccagcggcgccaccggaggcaccagtgccaccagcggccccaactcgttcgcggtgccggtgcggctgcgcgacgtggccaatgtggtcgactcggtgcaggacatccgcaacgccggctcggccaacggcaagccgtcggtgctgctggtgctgaaccgctcgcccggcgccaacatcatcgagaccgtcgaccgcgtcaacgagatgctgccgcagctgcaaaagatgatccccgcggcaatctcgatggacgtgatgatggaccgcacgcccaccatccgcgcctcgctgcgcgaggtcgagaacacgctgatgatctcggtggcgctggtgatcatggtggtgttcgtgttcctgcgcaatgtgcgcgccacccttatccccagcgtggcggtgccggtgtcgctgatcggcacgttctcggtgatgtacctggccgggttctcgctgaacaacctgtcgctgatggcgctgaccatcgccaccggctttgtggtcgacgatgccatcgtggtgctggagaacatctcgcgtcatatcgaggaaggcatgaagccgcttgccgcggcactgcgcggggcgcgcgaagtgggtttcacggtgctgtcgatgagcctgtcgctgatcgcggtattcatcccgctgctgatgatgggcggcatcgtcggccggctgttccaggaattcgcgatcacgctgtcggtggcgatcctggtgtcgctggtggtgtcgctgaccaccacgccgatgatgtgcgcacggatgctgcgcccgcccgagccggagaagcagggccgcttcttccgcgccaccgagcgcatgttccagtggctgcacgacggctatgcgcgctcgctgtccacggcgctgcgcctgagtccgctggtgtggctggtgctgatcgccaccatcgcactcaacgtgtacctgtacgtgatcgttcccaagggcttcttcccacagcaggacacgggccggctgatcggctttatccgcgccgaccaggccacctcgttccaggccatgcgcggcaagctcgacaatttcatcaagatcgtccagtccgaccccgccgtggtcaacgtgaccggctttaccggcggttcccagcgcaataccgggcagatgttcgtcacgctcaagccgctgtcggagcgcaacgaatcggccgacgccatcatcgcgcggctgcgcggcaagctgtccaaggagccgggcgcgagcctgttcctgcagtcggtgcaggatatccgcatcggcgggcggcagagcagctcgcagtaccagttcacgctgcagtcggacgacctggaagtgctgcgcgcgtgggagcccaaggtgcgcgccgcgttgtcgaacctgaaggggctggaggatatcgacaccgataccaacgacaagggcctgcagacctcggtgatcatcgaccgcgacgcggcctcgcgcctgggcgtgaccgcgcagcaggtggatgcggtgctcaacgatgccttcggccagcggctggtgtccaccatctaccatccgctgaaccagtaccgcgtggtgatggagctgagccaggaatacctgcaagggcccgatgcgctcaaggacatctacgtggtcaccggcaacggcaaccgcgtgccgctggcggcgttcgcgcgcgtgaccccgtccagcacgccgctgggcgtgaaccaccagggccagttcgcggcctcgacgatctcgttcaacctggccgagggcacttcgctgtcgcaggcgaccgacgcgatcacgcgcgagatggcgcgcatcggcgtgccggagacgctgcgcgccaacttccagggcggcgccaaggcgttccaggattcgctcaagagtcagccgatcctgatcctggcggcgctgatcacgatctacatcgtgctgggcgtgctgtatgaaagctatgtgcatccgctgacgatcctgtcgacgctgccctccgccggcgtgggcgcgctgctggcgctgctggcatcgaagaccgacttcagcatcatcgcgctgatcggcgtgatcctgctgatcggcatcgtgaaaaagaacgcgatcatgatgatcgacttcgccatcgatgccgaacggcgcgatggcctgtcgccgcgcgacgcgatctaccgcgcctgcctgctgcgcttccgcccgatcctgatgaccaccatggccgcgctgctgggcgcggtgccgctggcaatcggccgcggcgacggcgccgaactgcgcgcgccgctgggcatctccattgtcggcggactggtggtaagccagctgctgacgctgtacaccacgccggtggtctacctgacgctggaccgctggcgcctgaaggtcaaggcctggcgccagcgccgccgtggtgccggcacgcctgaccagccggccgccgtctagatttgcgaagactcgacatgacagttctttcccgcctcctgacccatgccctgccggtgtcgctggcctgcgcgctgctgctggccggctgcgccgtcggccccgactaccagcgccccgacgcgccggtttccgcatccttcaaggaagccgatgccgccacccccgcctggaccggcgactggaagcccgccgagccgcaggatgcgctggcacgcgccgactggtggaccgtgttcggcgatgcgcagctcgacgcgctgatgtccgaggtgcagatctcgaaccagaacatcaaggccgccgaggcgcagtaccgccaggcggtggcgtcgctgcaggccgcgcgcgccggcttcttcccgaccgtcgacgcacaggccggcgcctcgcgcgcgcgcggcgccagcggcagcacgctcaacgggcagagcgcgaccctgggcgcaacctgggaaatcgacgtctggggccgcgtgcggcgccaggtggaaagcagcgaggccagcgcgcaagccagccaggccgacctggcctcgacgctgctgtcgacacaggcaacgctggcgcagagctacttcctgctgcgcgtggccgatgcgcagaaggccctgctggaccgcaccgtggccgactaccagaagtcgctgcagctggtgcagaatcagtatgcggcgggcaccgcgcagcgctcggacgtgctgcagtccgagacccagctcaagagcgcgcaggcgcagcagatcgacatccagatcacgcgcgcgcagctggagcacgccatcgcggtgctggtgggcaagccgcccgcggcgctgacgctggtcgccgacgacttccgcaccgcgctgccgcgcgtgccggccgcggtgccgtcgcaactgctggaacgccgcccagacatcggcgcggccgagcgccgcatggcctcggccaatgcgcagatcggcgtggcgcaggcggcctactatccgaccctgtcgctgtcggccagcggcggcctgaccgccagcacgctggcgcgctggatgtcgctgccggaccggatctggtcgatcggcggcggcctggccggcacgctgttcgacggcgggctgcgcagcgcggccaaggcgcaggcggtggcggcctacgaccaggccgtggccaactaccgccagaccgtgctgggcgcgttccaggaagtcgaggacaacctcgccgcgcaacggctgctggaacaggaagcggtggtgcagaacgacgcgctgcgctcggcgcgcgaggcgctggtgctggtgaacaaccgctaccgcgccggcaccgctggcctgctcgacgtgctgacggcgcagaccagcgcctataccgccgagcgcaccgcgctgtcgatcgccggccgccagtacacggcggcggtggtactgatcaaggcgctgggcggcggctggcatgcgcccggtgcggaggctgcgccggcacaggccggttcgaaccaggccgtcagccagcgctagccgcaggcgcgcgcggcagcggctgttggcagatgcgctcgcgcagccaggtggcagccttgcccagcggccgctgcttgtgccagaccagctccatcgccaccggccagtcctgctgctggaatgccagcggcggcgtcaccagccgcgccgcggccggcgaattggccaccacgtgccacggcacgaaggcccagcccagcccgcgcttgaccagctccacgatcacccactggctttccacccaccacacgtccgcggccacgcgcaggcgcatcttctcttcgctgtctgagcgggtggcgaccatcagctggcgatagcgcttcagttcctcccagtccacacgctggccggccagcggatgctcgggcgcgcacaggatctgcatcggcacccagcccagcgcatggaagcccagcgccggtggcagcacctcctgccgccacatgatgccgaggtcggcgccgccctccaggaccagccggctgacgtcctccatcagcggaaacagcaactcaagctccaccgccgggaagcggctggagaactcttccagcagcatgcccagcgtctcttccggatagagctcgtccaccgccagcaccagccgcgtctccacgccctcgcccaggctcttggccacgccgcggaagtgctcgcagcgctccaggatcacgcgcgcctcggccagcagccgctcgcccgcgggggtcagtaccgggtaacgggcggagcggtcgaacagcgcgttgccggcgtcgatttccaggttggacaccgccgcgctgaccaccaactgcgccttgcccagccggcgcgcggcggccgagaacgaaccggtgtcagccgccgcgacgaatgcctgcaattgctcgatggagaggctcataaataactttccatgcttatctatctgttttacagatagtatccaacttggcaatccctgcccagcagatagactagctcccatcgcgtttgacacgcaaggagaacaacgatgcgcaagacctgggaccggattcgccacgccgtcggcttcgaggtggtcggcctgctgattttcgcgccgctggccagctgggccttcggctacgaactgcacgagatgggcgtgatcggagcggtcgcctcgctgatcgccaccggctggaactacctgtacaacgtgctgttcgacaagggcatgctgcgtttcaccggccagctgcgcaagtcggtgccggtgcgcgtgctgcacgccgtgctgttcgagctgggcctgctggtggtgttcctgccgtcggtggcctggtacctggacatcagcctggtcgatgcgctcatcatggacctcgccgtggccggcttctacatggtctacgcgctggtgtacaactggctgtacgacatcgtcttcccggtgccttcgctgcaggcacaagccaagccggaaggcgccgcgctcggctgagcgcgggtttttcccgaccccggaggcgtcactccggggtcttccccatcttgtcgcatccggtcgaattgttatactccataacaaatccaattcgaccggaggcagcgcgcccgcgcttgcgtaccggcgcatcctgcacgcgggggagacaccatgaagatcgcaatcgccggtggcggcatcggcggactgacgctggcgctgctatgccaccgccacggcatcgaggccgaggtctgggaggccagcgaaacgctgcgcccgctgggcgtgggcatcaacctgctgccgcacgccgtgcgtatcctgtccgagctgggactgcgcgacgcgctggcggatatcgccatcgagacctcgtcgctctcgtactacaacaagcgcggccagcgcatctggcatgagccgcgcgggctggcggccggctacgactggccgcaattctcgatccatcgcggcgaattccagatgctgttgcaccgtaccgcggtggagcgcctgggcgccggcgccgtgcataccggccatggcttcgagaccgtgctggacaccggcgcgggcggacaggcgcgctttggcctgcgccgccgcagcgacaatgccgaggtcgaggccagcgccgatgtgctggtcggcgccgacggcatccactcggcggtgcgccgccatttctaccccaccggcgacctgccgcgtttttcgcgccgcctgctgtggcgtgcggtcaccgaggcgccgccctacctggacggccgctcgatgttcatggccgggcaccaggaccagaagttcgtggcctatccgatctcggagccgctgcgccgccagggccgctcgctggtcaactggatcgccgagctgcgcgtgcccgacagcgtgcccgacaccccgccgcgcagcgactggaacaagcaggtcgacaaatccgtgttctgcgccgcgtttgccgactggcggtgggactggatcgacatccccgcgctgatcgacggtgccgaggcgatctacgaattcccgatggtcgacaaggacccgctgccgcgctggaccttcgaccgcgtcacgctgctgggcgacgccgcgcacccgatgtacccgatcggctcgaacggcagcgcccaggcgatcctggacgcgcgctacctgctcgacagcctgctcggcacgcccgacaccggctacgcgctgcgcgaatacgaggccgagcgcctgccgcgcaccgccggaatcgtgctgcgcaaccgcatgaacgggcccgagcaggtgatgcagctggccgaggaacgcgcgccgcagggctttgccgacatcgaccaggtgatcccgcgcgcggaactggaggcgatctcgctgcggtacaagcagctggcgggattcgaccggcagtcgatgcagggcaggcggtaggatccggcaggtttgacaatgcagaacaagaccatcgagagaggagacaccatggcgcccctgaccaccaccaagctggcccgcctcgcactggccgcggccctcgccttcagcgccggcagtgcgctggccgacatcaccgtcggcgtcagcctgtccaccaccggcccgtcggcgtcgctgggtatcccgcagaagaactcgctggcctacctgccgcagaagatcggcggcgaagcggtacgctacatcgtgctggacgatgcctcggaccccacccagggcgccaaggtggcgcgccgctttgtctccgaggacaaggtcgacatcatcctgggctcgtccgcggtggcgccgtcgatcgccattgccgaggtggccgatgaggcccagaccgtgcagctggcgttctcgccgatcgaactcaagcccgggcgcggtggctggaccttccggctggcgcagccggtgcggctgatggccaatgccgtggccgccaccgccaaaaccaacggcgtcaagaccatcggctttatcggctttgccgatgcctacggcgagacctggctgaaggacttcaccgccgccgccagcgccaacggcatccgcctgatcgccaccgagcgctacggccgcgccgataccagcgtgaccgcgcaggccatcaagctgattgccgccaaacccgacgccattttgatcgccggcgccggcaccggcgccgcgctgccgcacaccacgctgcgcgagcgcggctacggcggcaccatctaccacacccatggcgcggccaccaaggacctgatccgcatcggcgggcgcatggtcaatggcgcgatcctgccggccgggccggtgatcgtgccggagcagttgcccgcgggcgacccggtgcgcaagccggggctggactacgtcacccgctatgagaagcaatacggggccgacagccgcacgcagttcggcgcccacgcctacgacgccgggctggtgctggagcgcatcgtgccggtggcgctcaggcacgccaggccgggaacgccggcattccgccaggcgctgcggcaggcactggagaccgagcgcgacatcgtggtctcgcacggcgtgctgaattacagtgggcaagaccactatggcttcgaccagcgcgggcgggttatgctgaccatcgacaacggcaactggaaactgctgaaatgaatcccgacgcatccggcacaccgcccgccgcacccccgcgcccgcgcagcaccaccgccgcgtccgcgcggcgcaaggcgcgagacccgcttgcgccggatccggccgcaagcggcggtgccgatgccggtttcgacccgcatgtgccgaacatcgactatggcgtgctcgacaatctgatcggctacgccatccgccgcgcgcagatccgcatctatgaagatttcgtgctgtcgctggcgcaatggcagatcacgccgccgcgcttttcggcgctgatcatcatctcgcgcaacccgcacctgaagctgaccgaactggcgcagatcctcggcatcgcgcgctcgggggcggtgctgctggtcgacgcgctggaagagatgaacctggtggcacgccgcccggcagccggcgatcgccgcgcctacagcctggtgctgacggcagccggccgccgcacgctggaagccgccacgcaggcggtggtggcgcacgacgcgcacgtcggctcggcgctgagcgaggccgagcaggccacgctgaagtcgctgctggctcggctggcgccgccgcgggccggctgagggcagtcggcaagactgtcatctgccggcccgcggccatgcgttaacatggccgccatgccaagaacaatcgccgcgcctactgcatcgcgacccggcgccctgctgcgctgcctgtcgccactgctctcgcccatccttgccgccgtgctgctggccggcggtcccgcgcccaccccggcgcaagccaaggcgcccgccaagacggtcaaggcggcaaaagcggcgaaggccgccaccgccgcaaaaaccgctgccgatcccgcactggtgagcgccggcgtgccgaccccggtggccgcggcgctacgccgagccggcgtgccggcgtcggccgccagcttctacgtggtcaggctgggcgcgggcaccgcccgcgccagctggaatgcgcagcagccgatgaacccggcctcgaccatgaaactggtcaccacctttgccgggctgcagctgctggggcccgactaccgctggcagacctcgctctatgccgacgcccagcccggcttcgacggcaccgtcaacggcaacgtctacctgcgcggccacggcgatcccaagctggtgcccgaggaaatggccaagctggtggcgaaggcgcgcgccgggggcgctaccggcatcaacggcgacctggtgctggaccgcagctactttgccgatggcctggacggcaacggcaccatcgacggcgaagtgcagcgcgcctacaacgtcggccccgatgcgctgctgtatgcgttcaagacgctgtcattcacgctgacgccggacccggccagccagaccgtggcagtcagcgtcacgcccgagctggcgcagctcaagctggacaaccggctcacgctgaccaacggccgctgcggcgactggcagtccagcgccagcccgagcgtgctgccgcaggcggacggcaccgtgctggcgtcgttctcgggcgactatgccagcgactgcggcgagcacgtgctcaatatcgccacgctgtcgcatgcggagttcacatggggcggcttcgtcgccgaatggcagcgcgccggcgggcgctttgcccatatgcccgcgctgcgcagcggcaaggtgccgcgcggcgcggtgctgctggcgcgccactacggcctgccgctggcagacatcgtgcgcgacatcaacaagttctcgaacaacgtgatggcacgccagctgttcctgaccatcggcgcagaaatggaccgcggcggcccggccagcaccgggcgctcgatccgcgtggtgcagcgctggctggcgcgccaggggctggacatgcccggcctggtgctggacaacggctcgggcctgtcgcgcgaggaacgcatcagcgcctatgacatggcgcgcctgctgcagcaggccgcggccagcaacgtggggccggtgctgatcgattcgctgccggtgctgggcgtcgacggcacgctgcgcaaccgcctgacgcgcgccaacgcggccggcaacggctacctgaagaccggcacgctggccgacgtgcgcgcgctggccggctatgtggatgctgccgacggcggccgctacgtggtggtcagcatgatcaaccatcccaatgccgcgcaggcgctggaagcacacgacgccttgctgcaatgggtgtaccgcggcgcaccctaagtccgcgccgggcaggccgcggcgcggcgccgtggcctggcgccaacgccgcggccgcattttgttaagcggacgcttaccagcgtccgatccgcccctataatgccagggtgccggccgcgtcctgcggcggcagccttccgggccggccctcggccccgggcctgcattgccccctcgccctctgacatgacttcccgacaacccccggtgtggttgcgcctctggcatcgcttcgcacccgccgaacgcgccggctttatcgacggcgcgcgctactttgccccgtccctgcccgcggtcttctcctggggcctggtgaccggcgtggcaatgagcaaatccgtaatgaccgtgcccgaagccatcggcatgtcgctgctggtctatgccggctcggcgcaactggccgtgctgccgctgttcgccgcgggcctgccgctgtggaccatctggctgactgcggccgtggtcaacctgcgctttgtgatcttcagcgccggcatgcagccgcacttcagctacatgccgctatggcggcgcaccatcctgggctcgttcaacggcgacctgcacttcgtctacttcctgcagaagtacagcacgcccggctacgagcccggcaaggaaggctacttctggggcatggcgctgaccaacttctgcatgtggcagctgtcgtcgatcatcggcatcgtgctggccagtctgttccccgacagctggggcctggggctggccggcaccatggcgctgatcccggtgatgatcgccaccatcaactcgcgctcgacgctgctggcagtggtggtgtcggcggtgctggcgctgctttgcttcgatttgccgtaccgtctcagcctggtggtggcagtggtgggcgcgattgccgccggcatggccagcgacgacttggccgcgcgcgcggcactgcgcggcatccgccggcgcaagcccaaggcccccgaggtcaccaacgccgccgcgccggaaacgccgccgggagaccgcgcatgagccatcttgaaatctggattgccatccttggcatggcggtcgtcaccatcgtcacgcgcgcgctgttcctgatggccggcgagcatgtcaccgtgcccgaccgcatcgcgcgggcgctgcgctatgcaccggccgcggcgctggcggcgatcatcctgccggacctgatgacctggcaggggcatttcacggtggcgttctccaacgacaagctgatggcggggattgcggccacgctgttctacctgctgacgcggaagatggtggggatgatcgtggtggggatggcggtgtatacggcgctgaggctgctgggcggctgaattggcggcatcgtgcttggcacacgccggccctcttcctggctcctctcccgcacgcgggagagggagcaaaccggcaggttatttgcaccgcatgagtcaggaaccaccgcctgtgtgctccctctcccgcttgcgggagagggttggggagagggccggagcttcaacgaagtaaagcccccaggcaagccaccgccccctatcccccaaacgccgccgccgcccgctccagccgatcccgcacccccgcccaatcctgcccttcaggcaacacctcgaacatcagctgcgtatagccctgcttgtcgagcttgcgcagcaagcggtaaagctcgcgcgcataggccgccgcatccgcaggcgcctgcacccaggtacagcgctggtccaccagcggcgcccggccgacccacgccacgcgggcatcgtccggcagcgaggccagctgcgccgaagctgcttgcgcatcggccagcagcagcggtgtgtgcggcgcgtagtgagccttgagcgtgcctgaagcccgcggcgcggccgcgtcgggcggcagcggggccgcgcccagtacctgcgccatcatcgccgcggtgatcgcccccggccgcagcagcaccgggccgatgccctggtccagccgcgacaggtcgacgatggtcgattcgataccgacctccacgccatcgccttccagcacatagaccgcatcgccgaattcatcgcgcacatgctgcgcggtggtcgggctgacctggccgaacttgttggccgacggcgcggcaatgccgccgcggccgcgcttgaagcgcgccagcagcgcctgcgccacggggtgcgaggggcaacgcacgccaatgctgtcctggccgccggcgacggccggatggatatgcgcggcgcgcttcaggatcagcgtcagcgggccgggccagaacgcgtcgatcagttgctgcgctgcctcggggacctcgtcggtccagtagccgatatcggcgccgtccaccacgtggacgatcaccggatggttcgacggccggcccttgagcgcgaagatgcgggcgaccgcctcggggttctcggcatccgcaccgagcccgtagacggtttcggtgggaaaggcgaccagttgcccggcctcgagcaggcggacggcttcgtccagttcagcggccgtgggcatgcgcggcgacatcgtgttccttggagctatggcttcagagcgggatatgcagcgcctgcgcggcggcggcaaaggcggcgtcggccgcttcggcatgctcgcccacgcagttgacgtggcccatcttgcgcgacgggcgcgcatcgcccttgccgtacaggtgcagcttggcgccgggttgcgccaccacctcgtcccaggaaggcgtacgctccaggccgaactcgaaccacacgtcgcccagcagattcagcatcttgccggccgagtgctggcgcgtgctgcccagcggcagccgcgccatggcgcgcacctgctgttcgaactggctggtctcgcacgcatccatggtgatatggccggagttgtgcgggcgcggcgccatctcgttggcgaccagcgagccgtcggtcagcacgaagaactcgatgcacagcacgccgacgtagcccatctccgtggcgatggcagccgctgcggcacgcgcgcggtcggcgatctcgggcgacacgctggtcgacggcatcaccgtcgagaacaggatgccgtcgcggtgcacgttctcggccagcggccaggtggcggtggagccgtccgcggcacgcgcggccagcaccgagacctcataagccagcggcagcatctgctccagcacgcacggcacatgctgcatggcgttccaggcggcgcgcacgtcgtcgcgcgtcttcacgcgcgcctggcccttgccgtcgtagcccatgcgcgcggtcttgaggatgccgggcagcacgtggtcgggcagctggtcgacatcggcatcgtgctggatcacccagtgcggggccggcgacacgccggtgcgctcggcgcacgcggcaaagaacttcttctcgccgatgcggttctgcgcgatcgacacgcagtagccgcgcggcgcgacaaaggcgcccagctgctcgagccggtccagcgacagcgacggcacgttctcgaactcggtgcttaccgcctggcacagcttgcccatctcggccagcgcggcctcgtcggtgtattgcgcacagatatgcttgtccgccaccgaaccggccgggctgtcctggtccggatcgagcacgcatacgcgatagcccatcgcctgcgccgcatgcgtgaacatgcggccgagctggccgccacccagcatgccgagccacgcaccaggcaggatgggcgcgtcgggacggtcgacgccgaactcggcgcgcgattccggcgtgtgggcttcggagagatagggatggatatcggtgggcattgctaggttccgtgggatgtccggatgattacagcggcagcattacagtggcaaagtcatcgcgcgcgcggcttcggtctgcttcgcgcggaatgcttccagcgcgccggccagcgcctcgtcggtggtggccagcgtggcgatcgcgtgcagcgcggcattggcggcaccggcctcgccgatggcgaaggtggccaccggcacgcccttgggcatctgcacgatcgacagcagcgaatcctcgccgcgcaggtacttggacggcaccggcacgccgaacaccggcacgatggtcttggcggcgatcatgccgggcaggtgcgcggcgccgccggcaccggcgatgatggcgcggatgccgcggctgcgcgcgctctcggcatagcggaacatgtcgtccgccatgcggtgcgcggacaccacctgggcttcgaacggcacgccgaaatccttcagcatggccactgcgtgctgcatcacgtcccagtcggaactgctgcccatcaccacgccgaccagcggcttgtcttgcttgctcacttcagatccttgattgtttgctcccctctcccgcttgcgggagaggggccgggggagagggctggcgtttcccgacgcgtggcgccttgctaaaccacccctctccccggctctctcccgctgaggggagagggagaacaccgtcgggaaattgataacttactgcagttcttcgcccgtcagacgcgtcagcgcttcacggtacttggcggcggtcttttcgatcacctcgtccggcagttgcggcgccggcgcggtcttgggccagggcttgccgtcgatgcgcacggcttccagccagtcgcgcacgaactgcttgtcgaacgacggcgggttggtgcccacctggtaggaatcggccggccagaagcgcgacgaatcggcggtcaggacctcgtccatcagcgtcagcacgccattgtcgtccaggccgaactcgaacttggtatcggcgatgatgatgccgcgcgtggccgcaaactcggccgcttccttgtacaggcggatcgagatatcgcgcatctggcgcgccagcgcgatgccgatgcgggcctcgacttcggcgaacgagatgttctcgtcgtgctcgcccatctcggccttggcggccggggtgaagatcggctcgggcagcttttgcgcgttctgcaggccggcgggcagctcgatcccgcacaccttgccggtggcctggtagtccttccagccgctgccggcgagatagccgcgcaccacggcttcgaccaggatcggccgcaggcgcttgaccaccacggcgcggcccttgacctgctccacttcctccggcgcgaccacggtctcgggcgcgatgccggtctcgtggttcggcacgatgtgcgcgagcttgcggaaccagaagttcgccatctggttcagcacgcggcccttgtcggggatcggctcgcccatgatgacgtcgaacgccgacaggcggtcagtggtgacgatcagcagcttgtcattgccgacggcatagttgtcgcgcactttgccgtggcccagcagcggcagcgagttgatggaggactggtagagagcgttggacatgatggttccgataaaacggcgaagccgccgggcgctggatgcgtgccgcggcggccggaactgcaatccgccttcccctagcgcggaaggcggactagggacatttactgcacgacctgcgacagcttgcccgccttgtactgctgcgcgatatcggtcaggccgatcggcttgatcttgccggcctggccttcgcagccgaaggcgatgtagcgcgccttgcacacctgcttggcggcttcgcgggccggcttcaggtattcgcgcgggtcgaacttgctcgggttctcggcgaagaagcggcggatcgcgccggtcatggccaggcggatgtcggtgtcgatgttgatcttgcgcacgccgtacttgatcgcttcctggatttcctcgaccggcacgccgtaggtttccttcatgtcgccgccgaacttgcggatctcttccagcagttcctgcggcaccgacgacgagccgtgcatcaccaggtgggtgttggggatgcgggcgtggatttccttgatgcggctgatcgccaggatgtcgccggtgggcttgcgcgtgaacttgtaggcgccgtgcgaggtgccgatggcgatggccagggcgtccagctgggtggccttgacgaagtcggcggcctgctccggatcggtcagcagcatggagtggtccagcacgccgacggcgccgatgccgtcttcttcgccggcttcaccggtttccagcgagcccaggcagcccagttcgccttccacggtcacgccgacggcgtgggccagctgcaccaccttgcgggtgacgtcgatgttgtactcgtactcggccggggtcttgccgtcttcgcgcagcgagccgtccatcatcaccgacgagaagcccaggtcgatcgcgccctggcagatcgccggcgactggccgtggtcctggtgcatcaccacggggatgtgcgggtaggcttcgaccgcggcttcgatcaggtggcgcaggaaatgctcaccggcgtatttgcgcgcgccggccgaggcttgcatgatcaccggggcgttgacctcgtcggccgcctgcatgatggcctgcacttgctcgaggttgttcacgttgaaggccggcaggccgtagctgttctcggccgcgtggtccagcagctggcgcatcgatacgagtggcatgtctaactcctaaataaaaattgggtgtctctgtatttttctgtcggcgctcaataccccaccctgacaatcttcagggtgttggtaccgcccggctgccccatcggttcgccgatggtcagcacgatgaaatcgccacgctgcaccacgccctgcgccagcagcagctcttcggcctgctcgagcgcggtgtcgcggtcggcgctggactgcagcggcagcggcaccacgttgcggtacagctgcatcttgcgctgcgaggccaggttgggcgtcatcgcatagatcggcacatggattcggtgacggctcatccacaatgcggtggcgccggaatcggtcagcgcggcaatcgccttcacctgcaaatgataggccgtgaacagcgcacccatcgccaccgactggtcgatgcgcgagaaggtctggttcaggaaatcggtgtcgagctgcaccacctcggacttctcggcttcgatgcagaccgcggccatggcctcgaccgtctccacggggtagcggccggcggcggtttcagccgacagcatcaccgcgtcggtgccgtccagcacggcgttggccacgtccgagacctcggcgcgcgtgggcaccgggttgacgatcatgctctccatcatctgggtggcggtgatggtcagcttgttggcctcgcgcgccagcttgatcatgcgcttctgcagcgccggcacggcggcattgccgacttccacggccaggtcgccgcgcgccaccatgatgccgtcggacgcctgcaggatctcttccagcacgcccgggcggatcgcctcggcacgttcgatcttggcgatcatgcgggccttgtggccgtgcggctggccggccacggcggtcagctggcgcgccatttccatgtcggtggcattcttggggaagctgacggcgacgtagtccgcgcccagggccatggcggtcttgatgtcgtccatgtccttggcggtcagcgccggcgccgacagcccgccgccctggcggttgatgcccttgttgttggacagctcgccgcccacgcgcacggtggtgaagatctcgctgccgaacacacggtccaccaccagcacgatcaggccgtcgttgagcagcagcaggtcgcccgggccgacgtcgcgcggcaggtcctggtagtccaggccggcgcgctgctcgttgccgagctggcagctcgaatccaggatgaacggatcgcccaccttgagcgtgatcttgccgtgctcgaacttgccgacgcggatcttggggccctgcaggtcggccatgatggcgacctcgcgcccgcatgcctgcgcggcttcgcgcaccaggcgggcgcggtcgagatggtcctgggcggtgccgtgcgaaaaattcagccgcaccacgtcgacccccgccgcgatcatgcgggtcaggatttccagcgagctggaggcggggccgatggtggcgacgatcttggtggaacgagtcatgcgcggaattcctggttcagggccccggcaataccgccgggcccggcggatgcgtcagcctgcggcgcgctgctccagcacttcgaatgcgggcagcttcttgccttccaggaattccaggaacgcgccgccgccggtggagatatagcccacgcggtcggcaatgccgtacttggcgatcgcggccagcgtgtcgccgccgccggcgatcgagaacgccttcgattcagcgatggcctgggccagcaccttggtgccgttgccgaactggtcgaattcgaacacgcccaccgggccgttccagacgatggtgccggcggccttgagctgctcggccagcatcgcggcggtcctggggccgatgtccaggatcatgtcgtcgtcggccacgtccttgacgtccttgacggtggccgcggcagtggcgctgaattccttggcgcacaccacgtcgaccgggatcggcaccgaggcgccccgcctggccatgatgtcgatgatggttttggcgtcgccgaccaggtcggcttcggccagtgacttgccgatcttcaggccggcggccagcatgaaggtattggcgatgccgccgccgacgatcaggttgtcgaccttgtcggccagcgacttcaggatggtcagcttggtcgagaccttggacccggccacgatcgccaccagcgggcgcgccggctggcccagcgccttgcccagcgcgtcgatctcggcggccagcagcgggccggcgcaggcgatcggggcgtacttggcgatgccatgcgtggtggcttcggcacggtgggcggtgccgaaggcatcgttcacgtagacgtcacacagcttggccatcttccgggccagttcgtcgctgttcttcttttcgcccttgttcacgcggcagttttccagcagcaccacctggcccggcgccacctcgacgccgtcgacccagttctgcaccagcttgaccggcttgcccagcagctcggacaggcgcgtggcgatcggcgccagcgagtcctcgggcttgaactcgccctcggtcgggcggcccaggtgggaggtgaccatcaccgcggcgccgccagccaggcatgcctcgatggccggcaccgaggcgcggatgcgggtgtcctcggtgatgttgccggcgtcatcctgcggcacgttcaggtcggcgcggataaacacccgcttgccggagattttgccttgggaaatcaggtcggaaagacgcaggacagaggtcatggcgatggatggcgcgagatttcgctggaattcggggaaacgggcattttacctgatcgtggtcaacgctttgccgattccggaccgttacgcacttagcatgcggcccttgcagcacattcaggacaaccccacagggtgctagtgacatacctccccacgaaagaagggtcagctccatgcccctcttgacccccgagtgcggtaatgtatgcaacgtctgctataacagacacgcaaaaagcgccagagccggtcttgaaacggccatgacaacaggcggccaaaataacaagcagccaaaaagaatgcagccggtgtgcgatcagacgcagcgccggcgccgcgcatttccttgtcgcgaatgcagggggtgagtcagatgaaagaagccgacatgcacggagcgatccgtggcttgtacgagggcattctcgatcccggtgcctggcagcagagcctgcacaccctgacggaactggcggacacggcacatgcctcgatgatggtctgggacaccgtccgcgaccaggtcaccgtcaatgagatcgtcaatccggtggtggaactgttttccgagtacgaatcggactaccaggccatcgatccggccaagcagtacgcgccgcgccttcggccgggcgactggtatatcgacgcgcgcgaactgggcgaaggcaccatggcccgccatccgttctaccgcgacttcttccaccgctacgacctgcgctcctacgtggcctgcctggtcgagcgccagccccactacgaagtctatttctcgatgcagcgcgcgcgcacgcagccgctgttctcgcccgacgacacccgcggcatggactggatcatcccgcatatgcgcagcgccatggccatgcgcgaccgcacgctggggctgacggtgctggcgcggctgtcgacgcagctggtggagcggctcaattttgccctgctggtgttctcgccgcagcgccaggtgctgctgagcaaccgcgccggcgagcgctgggcgcggcgcctggacccggccggcaaggtgtcggactggaacctgtcgcgcccgttcgccgacatggtgcaggccgcctgcgacccgcagcgcgcggtcgccgcgcaggccgcccgcgccaccgacggcaacggtgcctgcgcgcaggtgatcgtgctgccgctgccgccctcgcacgcgtttgccgcgcaatggcaggaaccggcggcactggtgatcgtgcatgagcaggacagcgcgccgctgttgctggcgccggtgctgcgcgacctgtacgggctgaccccggcggagacccggctgaccacccagctggccaccggccagggcctgcccgaagccagccagcagctgaatatccgccacgaaaccgcgcgcacccagctcaaggccatattccacaagaccggctgcaacagccaggcccagctgacgcatctgctctcgcgcctgggcgcggcgctggacgaggcctgaacaccacgcgcccggcagcgggccggcgccgcgcccgcggcccgcccgttgccccgcgaagaaagtgctaaaaataaaagaagtaaaaagaagggaagccatgagcgacacacagatgcacgacaccattcgcgcgctgtacgaggggatcttcgatgccgatgcctggcagcgcagcctgggcgcgctgtgccaggcgagcggcagcacgcatgcccatctgctggtgctcgacaccgtcaacgagcgcgtgctggtgaaccaggaggtcaaccccatgccggaggcggtggccgcctacagcgaacactacgtagccatcgacccggccctgccgttcgccaggcgcatgtcggtgggcaactggtatatcgattcacgcgagctgggcgcgcaggcgatgcgcaagtcgcccttctacggcgagttcctgcggcaattcgaacagtcgtcggtgatggcctgcctgatcgagcgccagccgcactacgacgtgttcctgtcgctgcagcgcccgcagggccacgaccactattcgcccgaagacgcgcgcgcgctcgactgggccatcccgcacatgcgccatgcgatggcgctgcgcgaccgcacccaccaggtgtcgacactggcgcatgcgtcggcgcaactgatggagcggctgccgttcggcgtgatcgtgttccgcgacgacggcaagccgctgctggccaacagcattggcgagacctgggtgcgccggctgctgccggcggtgtcggtcgaaacccgcgccgtggcgccgcccgccatagccgtgcgcgaggaagccgactggcagctgtcgcgcccgtttgccgaggcgctgcgggcggcatgcaaccccgccaacccgcagccggcgcaggcgctgcgtgcggtcgacagcgccggccgccaggcccaggtcgtgctgctgccgctgccgccggcacaccatctggcgatggactggcagcgccccagcgtgctggtggcgatccacgagcccggcaccgcgccgatgacgctgccagccgttttgcgcgacctctacggcctcactccggccgagacccggctggcactgcagctgtcatcgggcatcggcctgcccgaggcgtgcgagctgatcggcatccggcgcgagaccgggcgcacgcaactcaaggcgatcttcaccaagaccgggacgggcacgcaggcgcaactggcgcacctgctcacgcggctgggggtacggacctgaccgaggccggcgcgcgtcagtcgatcgacgcgcccacggtcttgaccacccccgcccacttctgccgatcccccttcaccgtagccttgaactgatccacggtctcgacccgcggcgtgttgccggcatcgatcagcttctggcggatcgccggcgtttccagcgccaccttcaccgcatcgttgaccttgcgcgcgatcttcggatccagccccttgggcccgaagaagccgaaccagatggtgctgttgaagccgggcaggccgctctcggcaatggtcggcacgtcgggaatcacttgcacgcgctgcttggtggtcacgcccagcaggcgcaccttgccggcgcggtactgcggcagcacgctctgcacctggttgaagatgcagcagacctcgcccttcaccaccgcctgcagcgcgtcggggccgcccttgtagggcacgtggaccatgtccaggccggcgcgcgcattgaactcggcaaaggccaggtgcgtgccggtgccgttgccggtggaggcaaagttgtacttgcccgggttggccttgaccttctcgataaactccttgaccgacttcacgtccagcaccgccgggttgacggtcagcacgttggagacctcgaccagcggcgcgatcggggtgaaatcggcctcggcgtcgaacggcaggttcttgtacagcgccgggttgatgccgtgcgtggcggcggtgcccagcagcagcgtgtagccatccggcctggcatgcgccaccacctcggaggcgacgttgccgccggcgcccggccggtagtcgtagatgatggtggccttcagcgacttctgcagcgattcctgcagcgtgcggccgacgatgtcgacgccggagccggcagtaaagcccatcaggatcgtcaccggctgcgtcggccactccccttgcgcgcgggcgggcgagctgaccgtgctgatggcagcggcggcgcacagcgcggccaggccggtagcggaacggaaggacaagcgcggaagcaggcgggacgaagtaggcatggggggcaccgtcggtaagtatcagcaagataagacccggcgcggcgggtcggcacaatgatgaccgggatctgagccccgggccagcgccacacgatagcaaggttcctgccaaaaccaaacgaccgtgttcgcttgagggtattcgatcggggcatatgtacccctcctcggcatcgcctcagcgccgcagcaaccccaccagctcgtccacgtccggcagcggcgcgccggttcccgcggcgctgtcgtcgtcggcctccagcagcccgtcggccagcgcgcgcttgtcgcggtgcaggtcgacgatgcgctcttcgatggtgccggcattgatcagccggtacaccgtcaccgggcgctgctggccgatgcggtgcgcgcggcccatggcctggtcttcggcggcgggattccaccaggggtcggcaatgatcacgtagtcggccgcggtcaggttcaggccgaagccgccggccttcaggctgatcaggaagacatcgccctcgcccgcctggaaggcggccacgcggcgggtgcgctcggccgcgggggtggcgccgtccaggtactgcagcgccagcccggcgcgctccagcccctggcgcagcagctgcaggaagtcgacaaactggctgaacaccagggtcttgtggccgctcgcggcaagctcgctggccagctcgacaaaggcgcgcaccttggcgccttcggacagctggccgctgagttccggcgtgaccaggcgcgggtcgcacgcggcgcgccgcagccgcatcagctgcgccagcacgtggatgcgcgcctgggcctggtgctgggcctgcgccagggcgcgcgcacgggccccggcaggcgcgcctttggtggccttgcgtgccgcttccacgcgcgccagcgcggcctcggcctcggtctgggcctggcggcgcagggcctcgtagtgcgcggcttcgaccggctcgggctcgacccggatcaccagctccgtgcgcggcggcagttcgtccagcacctgcgtcttggtccggcgcagcacgaacggcgcgatcatgcggcgcagccgctggcgcgcctcgcgcatgccgccgcgctcgatcgggttggcaaagtgttcgttgaagcgggccagcgagcccagcaagcccggattgcagaaccgcatcaccgaccacagctcggccagccggttctccacgggcgtgccggtcagcgccatgcggaagcccgacggcagcgcgaacatggcctgcgcccgccgcgtgaccgcgttcttgaaggcctgcgcctcgtccgcgaccacggtatgccattcgcgcgcgcagaacgccttgctggcctgctgcagcagcgtgtacgagatgatcaccaggtcatgcggcccggcctgcgccagcagagtctcacgatcgccctcggcataaacatggacgttgagcgtgggcgcaaagcgccgcgcctcggccgcccagttgccgcacaccgaagtcggcgcgatcaccagcgcggcgccgccgccggcgcgcgccaccagcaccgccagcgcctgcagggtcttgcccaggcccatgtcgtcggccaggcaggcgcccaggcccgaggccgccagcgtcatggcccagcggtagccagcctcctggtagggccgcagctcagccgccagcgtggcaggcagcgcgatgtcagcctcgcgcgcggcgcgcagccgggcgatgcgctggcggaaatgcgcatcgggatcgacgccggcgccggccagcacgtcatccagccacggcgtggccatctgcgggacgcgaataccgtcgggcacatgctcaccgacgccggcgaggtcgcgcagccggccgcgcagcgtgcgcgtcagcgccacgtagacgccctgccccatcggcacgaagcgcccggcgtggctgccggtccagtcgatcagcttgcccagttccagcaccagcccctcggccacgcgcagctcgccggccagccggtaccacgcgccgcggctctcgatctgcacgcccagctgccgcaggtcggccggcagcacgcgaatctccttgccgcgcggccattccacggcctgcacggcgggcagtccgggcagcgcctcgaccacggcgagcgcgtcctccggatcgtccagcatccaggtgtattcgccgcccggcggcgccagcgccaccagctgcggcaatgccgcgaagacctcggccacgctggccagctcggcatccaggtcgcgttgcgtggccagggtctcgccgcgcaccgccgccatcaggcgctcgcgtccggcgccgggcgcgagccgcggcccgagcggccccagcggcgtcaccaccagccgcagcgaaatgccgcgccccgccagcccgcccaacggtgccacctcggcgcgcaggcgcgcgtcagcctccaccgcgcgcgatccgcccgtctggtcggcctggacctggaactggccggccagcgcgcgcaaggtctggttgagctgggcgtggccgtcctccgggatcgccaggccatcgccgatcagccgggcagcctcgaactgcgccggcgtaaagcggatcagccgcagccggtgcgggccgtcgcgcaccaccgtgagctggcgcagggcctcggcctcctggcgcgcggcggccggcagcaaggcttccatcgccggcgcctcgcgcaccggcgggaacatgcgcagcacgtagcggccggcgctgcgcaccgcttccagcgcgggcgcgtcctccaccacctccagcgtctgcgacggcgcatgcgccagcaccacgcccgggtgccccaccagcgccatcgccgcggcggcgcggtcgagcacgtagcgccggttgtgcgactggtcgcggcggatggcgcgggccacgcgggcgtcccacggcgccagccggtcgtcctcggccacgcgcgccagcggcaccggcctgggcttgccccagccgcgcgcgccgcgcacctgctcgagcggctcgatcgtgccgggcgcgccgtcggcatccagcgtcagcgcccacagcaggcgcctgccgccttcgcccccggcggcaggctcgctgccggcgagcgcgcgcagcgcctccagcgcctgctgccagccggcctgcggcgcggacgcgccgccggggtcggaagccctgtcaggcgggacatcgggtccgggatgtggggtcaaaggcacggcgagtgtgggaatcaaggccgccagcgcggcggcacggtgcgcggaacagggcaagaatgcccgaaaaagaggattctagaccgcagcggcgcccgcaccgcgttgtgacccatgccccccgggcttacaatatcgtttttgctatttccacggcgcagggagaacagacatgtcgatggcggatcgcgacggcaagatttggatggacggcaagctgatcgaatggcgcgacgccaagatccacgtgctgacgcatacgctgcactatggcatgggcgtgttcgagggcgtacgcgcctacaagacccccgaaggcacagccatcttccgcctgaaggagcacacccgccgcctgttcaattcggccaagatcttccagatggtcatgcccttcgacgaggccacgctggaagcggcgcagcgagaagtggtgcgcgccaacaagctggaatcctgctacatccgcccgatcgtgtgggtcggcgacgagaaactgggcgtctcggccaagggcaacaccatccacgtggcaatcgcggcctggccgtggggcgcctacctgggcgaggaaggcatggagcgcggcatccgcgtgaagacctcgtcgttcacgcgccaccacgtcaacgtgtcgctggtgcgcgccaaggcgagcggctactacatcaactcgatcctggccaaccaggaagccaccggcctgggctacgacgaagcgctgctgctcgacaccgagggctatgtcagcgaaggctcgggcgagaacgtcttcatcgtgcgcaacggcgtgatctacaccccggacctggcctcgtgcctggacggcatcacccgcgacgccaccctgaccatcgcgcgcgacctgggcatcgaggtgcgtgaaaagcgcatcacccgcgacgagatgtactgcgccgacgaagccttcttcaccggcaccgccgccgaagtcacgccgatccgcgaactggacgaccgcgtcatcggcgaaggccgccgcggcccggtgaccaagcagatccaggacgcgttctttgccgccgtgggcggcaccaacgaaaagtacaagaagtggctgacgctggtctgagcaccggctgccagcccctgttgcgcgcgcccggcactgccgggcgaggcacaccctctgttttcatcgaacaataagcatcactccctgcaacaccatgacgcaaaccgccaccatcatcgaaatcggcgctgaagacattccgctgcattgcccgaccgccaacaccccggcatggaactaccatccgcgcgtgttcctcgacgtggcagacaccggcgaagccaagtgcccgtactgcggcaccgtctacaagctcaagccgggcaccgtgctgaagggccaccactgacccgagccgcccgcattcgcacgatcctgacgctccgggccgcttgcaggcgccccggagcgtcggcattgccggcgtccgcgccgacgctcccgtgccggctccaagcgccccgcccatgaagaaagccctcgtcatcgcccccaactggatcggcgacgccctgatggcgcagccgctctttgcgctgctcaaggcgcgccatccgcgcctggtcatcgacgcactcgcgcccaagtgggtcgcgcccgtgctcgcgcgcatgccggagatcggccgcgtgttcccgtccgacctcgcgcacggcaagctgcagctgtcggcacggctgatgttcgcgcagcagctcaagaacgaaggctatgacctcgcctacgtgctgccgaactcgctcaagtcggcactggtcccctggctggccggcatcccgctgcgcatcggctaccgcggcgaagcccgcttcggcctgctcaacgtgcgccacgccaacccgccgcgcgacaagcgcccgccgatggtggagcactacgcccgcctggcgctcaagcccggcgcgcgcctgcccgaagacctgcccgagccgcgcctgcgcgtcgacccgacgcgcatggcggccaccgccgagcgctttggcatcgccccgcacacgcgcgtgatcgcgttctgcccgggtgccgagttcggcccggccaagcgctggccggccgggcatttcgccaggctcgcgcagatgctgcggcgttcctacccgtatgcgcagatgatcacgctgggctcggccaaggacgccgagatcgccgccgagatcgtcagcgaggccccgttcgtgcgcaacctgtgcggccagacctcgctggatgacgccgtggacctgctggcgctctccgaagccgcggtctgcaacgactccggcctgatgcacgtcaccgcggcgctgaaccggccccaggtggcggtgttcggctcgagcgacccgcgccacacgccgccgttgtcacaggcagcgagtatcatgtggctgcaactggagtgcagtccctgcttcaagcgcgagtgcccgctgggccacctgcgctgcctgaaagagatcgaacctgaaatggtgttcgtcgagctgcgcaagctgctgcaccggccctgacctcactgccctcgccacttctactgccaccatgcctcgctttgcccgcctgttcgattccgccgaagacatcgtcgaagcctttcgcgaagcgctgaagctgcgcgacgcagacggcgcgctgcgcctgtggctggacgaagactcgatcacctgcgtgctgcccgacggccagcgcctgatcggccacgaacagctgcgccaggccttcctgcaactgctggaagaacagccggtgctggtcgatgcaatcgagaccagcagccatgcgtcgatggccgtgtcgatcttcgacgtgaccgaggcgctgcgcttcggcggcgaccgcgtcgaggccgacctgtacgtgcacaccacctatgtactgatgcagaaccacgaaggctggcgcctggcgcatatccactgcagcccggccaacgcggtgcaggttgccgccgtggccgccgcgccggggcaggcgctgcactgaacccgcatggccgccgcgccgcggcctgctgcaacaccacgccggcatgacgcagcttccgcaccaccgccttccccaggccgtccacgccgcccaggctgatcccgccacggcgcccggccatggctacggcgaaggcgtgccgatgccctggtggctgcgcggcggccatgcccagaccatcatccccgcgcgcttcacgcgccgcccgccgcgcgtgagcttccgccgcgagcgctgggatacccccgaccaggacttcatcgacctcgactggaccacccacccggtgcgcccggacacgccgctggtggtgatgttccacggcctggagggcgattccggcagccactacgcgcaggcgctgatgcatgcgctgtccctgcgcggctggcagggcgtggtcccgcatttccgcggctgctcgggcgagctcaacctggcaccgcgcttctaccattcgggcgattcggccgagatccgctgggtgctggaacgcatgcgccagcgccactgcgccaacgggcgcaagctgctggtggtggggatctcgctgggcggcaacgcattgctgcgcttcctgggcgaggacggcaccagcgccggccacgtgcatgcggccgcggcgatctccgcgccgctggatctggctgccggcggcgcggcgctgtcggccggcttcaacctggtctatacgcgcatgttcctgcagacgctcaagcgcaagtcgctggccaagctggggcagttcccggggctgttcgaccgcgacacgatgctggccagccgcgacctgtacgccttcgacaacgtcgtcaccgcgccgctgcacggctttgtcgataccgacgactactggcgccgcgccgccagcaaacccgtgctgcgcgacatcaccgtgcccacgctggtgctcaatgcgcgcaacgatcccttcctgccggcccggcacctgcccggcccggccgacgccagcccccaggtatggctggaacagcccgagcacggcggccatgtcggcttcatgaccccgcccgagggctggcgccggcacctgcccctgctgcccgacgggcgcttcagcggcgacatcgaatggttgccggcacggatcctgagattttttgacggcatgatgtgaggcgggcgcagtccccccacggcccgccgaggagacggacatggacgagatcgtcaggcaagccatggcacgctggcccaacgtgcccaacgcctacggctggctggcactggaccgccgcggccagtggcgcctgcgcaatgagtacgcccagcagcacgggctgtcgggcgaccccatccgccatgaagcgctgatcggctttatcgaacgcaactacctgtgcgacgagcgcggcgcctggtacttccagaacggcccgcagcgggtgttcgtttcgctgggctatgcgccgtgggtggtgcggctgcatgaaggcgcgctgcgcacgaccacgcagcaggccttcacgctgcaggcctgctacgccgacgagcacggcaacgtggtgctggccggcacggtcgagggcatggcgcaaggcagcccgccggcacagcaggccgccctgctgcacgaccacgacctggaactgttcagcggcgccagcacctggcatggcgaagcctgcggcactgacctgggcgtattccaccacgatggccgcgacatcccgatcgagccggttgccgagagcgaggtgcccaggcgctttggcttcgtgcgccagccggcgccgccggctggctgaacgcctgcctcagttaggcatgcccttgctgtcctgcttgtcctcgcggtactggcgctccagctggtgcaggcgcgcatcgacctcggacagcgtgtagaagtcgccgtcgccggccttgcgcgcgatctgcaactgctcgatcgcggcctggtaggcgccgtccatcgcatacttctcggccagcgcctggtgctgctgcaagcgcttgccctggcccgcgtaggcgcgcgccagcagctcccaccattcgctgcggctggtctcctggcgcgtgcgttcgcgcaggaagcgcacggcctcttcatagcggcctgagccgaccagggtatcggcataggcaatcgccaccgcatgcgacagcgcgaacgccttcatcgacgcgctggcctgggacagcgcctcgggcacgcggccctgcgcgcgcgccagttccaccgccatcacgtccagcatggggctgcccgaggaggcaccgggaatattgccgtagagacgtcgcgcctcggccagctcctgttcggcggccgggtagcggcccagccgctgctcggtgaaggcaaggccgtagtgcagcgccggagcgcgcagtgccgttgctcccggcagttgcgtgcgcagcgccgcgcgcaggttctgcaggtcgctgggcgacgattcctggatcacgcgggcccgcatccgcgcaaactcgtattcaggcgtgttggcgaccttgcgcttgctggcatggctgacgcggtcctgcatgtcggcaatccgctcggaggtcagcgggtgagtccgcacataagacgggaccgaattttccgcggtccccgatgcgcgctgcagccgcatgaagaaatcgggcatgccctgcgggtcaaaccccgccgcggtcaggatctggaagccgacccggtcggcctcgcgctcggccccgcgcgagaacgacagctggttggcgatggccgcgccctgcccgcccatggccagcgccgccgcggcgtccgggctgcgcgtggcggccaggcccgccagcaccatcgaggccagcgcgatccacatcgactggtcctgcgaggtgatgccacgcgcgatatgccgctgcatcacgtggccgatttcatggcccagcaccgaggccagttccgattccgtatcggactgcaccagcagcccggtatgcacgccgatatagccgcccggcagcgcaaacgcgttgatgctgcggtcacgcaccgcgaacaggtcaaagccggtggcaaaggtgcccgcaccggtcgagccggagatattctggcgccgcgccgcctgcaccagccggtagcccagcgcgttcaggtaatcggacagcagcggatccggcacgtacagcgggtcgcgccggatatcgcgcatgatgcggtcgcccaggcgcttttccatgtcgggcgacagcgacgccgtggacgggtcgcccaggtccggcagctgcacgccgccggcctccaccaccgcgttgttggtgcgcaggccgaactcggacttctggcccgccttcacgctgcggttcaggttgtcatagacctggtcgctggcctcgcccgagatggcgggcaccggctgcgggggcctggccgcgggcgcagccgccaccggcgtggctggcgccggggccgtgcgcggcgtaccctggggccaggccggcgccgcgaacgtcagcgccagcagcgccgccagcggccgccgccatggcgtccatgcgccgccagcgcggcaatggccggcgcctgcgcgatgtgacgcggagccggcgggaacagcgtccgccacggcgccggggccgcgtgcggcagacctgcgaagcgatgggtgttttggcatgttgctatgatagcggcctcccgtggccgttcccatcggatgcttcccagggacgccggcggccaccagcacgcagttcgcactgaagctctcgatcatgacccagctcacccatttcgataccgccggacaagcccacatggtcgacgtcggcgacaaggccagcactcaccgcgtcgccgtggccaccggcaccatcaccatgcagccagccaccttcacgctggtgcgcgacggcagcgccaagaaaggcgacgtgatcggcatcgcccgcgtggcggcgatcatggccaccaagcgcaccgccgacctgatcccgctatgccacccgatcggcctgaccaaggtggcggtcgagttcgcattggacgaggccaccgccactgtcgcctgcaccgtgcgcaccgaaacccgcggccagaccggcgtggagatggaagcactgaccggcgtgcaggtggcgctgctgacgatctacgacatgtgcaaggcggtggaccgcggcatggtgatcggcaatgtgaagttgctggaaaagcatgggggcaagtcgggggattgggtggcggccggctgacctccgcacgtgacgcctgcaacacgcgccgcgatgggcagtgtcataatgtcttacgctagggtcgttccccggtaatagaggtaacgccgcatttccagccgggccgccgtggcgccggcgcgggacaatttggtattcaatatgattgcaggcccgccgctggttgcggcctgctgaccctgtccgtggcgtgccatgcggtgcgcgcggggatgaggtggataccatgaacgggcgcatgctctgccagatcgccctggcactcgcggccacggccgcaagcggcgccgccctcgccgggcgggccgatctccacgatgccgctttgcacgatagcgacgcacgcggcggcttcatcaagacgcgcacaagcgtcggcgtgggcctctatttcgggcccggcgtgttctacggcggctacccgtatggctaccccgccccgtactactacccgcccgccgtggtcaccgcacccgcggcgccgccgcagtacatcgaacagggaccgaacggccccgtgccggtccccggcccggacggcgtagcgccgcagcagggctggtggtaccactgcgaccagcccgaaggctactacccctatgtgcaggcctgccccggcggctggcagcgcataccggcacagccgccggccaactcctgatgcggggtgacaccatgcatgccctgacccgcgccacgctggccgtggccaccctgaccctcggcgcctgcgccgtgatgcctgccggccccagcgtgatggtgctgccaggcaccggcaagagcttcgaccagttccgcgccgacgactacaactgccgccagttcgccttcgggcgggtgggcggtgtctcatcctcgcaggccgccaacaatgccgccgtcggcagcgccgtggtcggcaccgcgctgggcgcagcggcgggcgcggcgttcaatggcggatcgggtgcggcggtgggtgcgggcgtcggcctgctgactggcgcggcggtcggcgcgggcaatgcccagtacgccggctacggcacgcaacagcaatacgatgccgcctacgttcagtgcatgtacgccagcggcaaccgcgtgccggcccccggacgcgtcgccgctgcgccgccgtcaccacggtactactactatccgccgcctccgccaccggtctattacagcccgtatccgtactactaggtcagtcccggcgccattcggaataccgacgcgaacggtcgccgacccatgcgcagaatacctgcgggcgttcgtctggcgtcaggtcgcggcaggccttcgcaatctcggcgtattgcgcgacttcatcgccaaggtagtaccagcgcagccgttccatccactggcggccttgcgcaggatcgccggtcagcgccagcagccatgcggtgcgcgcgatcatggtcggcgtaggcagcaggtggacggcggcgatgtgggcgggcaacaactctgccgcattggccggcgtaatggtggccaggccggcagcgtcggcctgcgcgtgctggcggaaccagaagcgcggcatcggcaaggcgttgcggccttcgctgctggcgtattcgcgggcttcggcgcggcggtagtcttgccacatggtggccagcacggccacagccaccacgacaaacgcgagcgccagcccacgtgccactggcatcggcacgcgccaacgcccgaaacccgacggctccagccaaccgagcatgaagcagaacggcaggaagaaatagagataatgcagcgggtattcgagcatcgaatgcgcgcacagcatcgccagccaggtgagaaccagcacggtctgcttgcgctcttcgctatcgccgtgccacaagcgaacgcgaatcacgcgccatagccacgccagcaggatcaggcctacgccggcggtaccgacgatgcccgtctttgccagcaggtcgaggatggcgttgtgggcgtgcagggacatctccaccttcacgccgacttgctgcaactgctggaattgcgcccagccgaactcgccccagccgacgccgaaccacgggtgggagcggaaaattgccagcgcgtgggtccacagtgcgccgcgtgcggacagctggtcttcggcttcgagttgggcgatggtgtcgaacaggcgccagtcgaaggcttgccctgcggcgcggattgcgggctgcaggatcagtagcatcgccaacattgcaactgcagcgacgatcagcccgaccggacgttgcataggatccgagtcacgtcgagcgcctcgcgccagccacgccgcggctagcgcgtagaaggcagccaggccaacatgcagcacgccggtgcgcgaaccggacagcacgatgccgctttccagcaaggttacagcggccagccacatcggaaatcgcaggcggccccgcgatgccagccacactgacgccaccagcgccaggccttcgacggtggcctggtggttgggttggttcaggttgccccacaggcggcggttgttgtcgtagaaataggtggagacgaggccgaaggcacgcggttcgagatggaacagttgcacccattgtgtgagcgtgcccagcaggccggcgatgaggaaggccgtggcgagggtgtcgccgatattctgcactgaggctgcggtcgtgcctcggtaagaccatgcggtgcatgccaccgtggcgccgaggaacagcgtgagcacggtgatgaggcggctaccggtcacgtcatggtgcccggtagcgcccaatgcaagaccgacggcgaccaagcagagaaacagcagtgatacccacggcagcgacacggcaggcgatgcagcggggcggcgacccgcatggatcgcgaggacggcgatcacacagagtgcagctgtccattcgccatagaacgtcgccagcggcagcgtgtgccgggagactagcagcgggacggcgattgctgcgatgagggcggccgacggtaggaagggcctggaaggctgcatcgaggcgcctgtttagggaaaaggcgcatcatagcttgggggccgggcaaagaaaaagcgcccagaggcgctttttctcaggcattccgtacttagatgcccgtctgcgcacgcgtgcaagttgcgcccgtagttacaccggtccaaacaatcgagttcgcattggcggtaccggtcagagtcaccacacatccgtttgccaagcccaggttgtttgccgctgcagtcagctcaatggtcgttgtagtagcggtgggggccgtcggcgcgccagcgccaaacagcaaggtgacaccggccggtgcgggtactgccgggtaaccggtcgcagcggtgagctgagcaagagttccgcatgcggtcaggttcccacccgagacctgcgcacattgggcgatcgcctgcttcaacggtgcaatttccgtcagcgggctcgaccaccggctacgcgtcacataatcctgatactgcggaatcgcaattgccgccaaaataccaatgatcgcaaccacgatcatcagttcgatcagcgtaaagcccttctggacacgacggcccagcttcttcagttgttgtacccgttgcatgatttgacccctcgaagagattttagttgagcgttgcacgtcttcggtttcgtgacgcggggactattgagcagtaaccgtgccagcggcatcccccatcggttgggggtgaaaagcgacaaatttcgtcacccatcagggggatgcatgccgtatgcgccaaaatttgtcacttgcgctcgctaccgccgcgcgaagcgacaaaatgtgcgatcactcacatgagttagttggccaaggcaccgacggccgccttgcggcgcgccaacgaaaaagggcggccagctggccgcccttctcgcctgggcgaaatctcgtcaggcggcctgtgccgaccggcggctcagcagcttgcccatgatcaccaccaggatcgcgccggcggcgccgaataccaggtgggcgtgcggcacgtggacttcgaaccaggcggcgtcgaccgggtcgctgaccagcatctcaccggccaggtagcccaacagcgcggcacccagcacgatgatgaccgggaagcgctccatgaccttgagcagcagcgtgctgccgaacacgatcagcgggatcgacaggcccaggccgatgatcagcagcatcagctggctgccctcggggcccttctgcgcggcggcggccacggccaccacgttgtcgagcgacatcaccaggtccgcgatcaggatggtgcggatggcggcccagatattgtccttgccgtcgtggccttcctcatcgtcatcgccggtcagcagttgcacgccgatgtagaccagcagcatggcaccgacgatcttcaggtacggcaggctcagcagcttgaccgcggccacggtcagcaccacgcgcatgatgatggcggcggcactgccccagaagatggctttcttctgctgggcgggcggcaggttgcgcgaggcgagcgcgatcaccaccgcgttgtcgccggacaggacgatattggtcaggatgatcgatcccaacgcaatccagaatgtggtggaagacagcagttccacgggagggctcctcgaattttataggttgcacacccgtcatctgacgggatttcggatgtctcgaaacacggacatgactgtttaccgcacgaacctttcgattagatttcaatcctgtaatgtttcgtgccggaagccacgccgaatccgtcctccagaatgacaatgcccccgcgcgggcgggggcattgcctggttcgccattccagcgctcgctggaatggcgaggtacgacttacagcattgccttcagcaggcggcccatctccgacgggttcttggtcaccttgataccgcaggcttccatgatttccagcttggcctgggcggtatcggcaccgcccgagatcagcgcgccggcgtggcccatgcgcttgcccggaggcgcggtcacgccagcgatgaagccaaccaccggcttcttcatgttttccttgatccagtaagccgcgttggcttcgtccggaccaccgatctcaccgatcatgaccacggcgtccgtttccggatcgtcgttgaacatcttcatcacgtcgatgtgcttcaggccgttgatggggtcgccaccgatgccgacagccgacgactggcccaggcccagcgcggtcagctggcccacggcttcgtacgtcagcgtgcccgagcgcgacaccacgccgatgcggcccttcttgtggatatggcccggcatgatgccgatcttgatttcgtccggcgtgatcaggcccgggcagttcggtcccagcagcagggtcttcttcttctcgcggcgcatgcggtccttgacttccatcatgtcgcgcacggggatgccttcggtaatgcagaccaccaggtccaggtcggcgtcaacggcttcccagatcgcggcagcggcgcctgcaggcggcacgtagatgaccgacacggtggcgccggtctgagccttggcgtccttgacgctggcgtagatgggaatgccttcgaagtcttcaccggccttcttcgggttcacgcccgcgacgaagcagttcttgccgttggcgtagtcgcggcagccacgggtgtggaactggccggtcttgccggtgatgccctgggtgatgaccttggtgtctttgttgatcagaatcgacatgctgtaatcctttgcttggctacgagcggcgcgcgcgagggcgcatcaaagcgcctgcgcaccgcccgcgttcgcgtatggttgcgttcgtgcgacggcttacttgccagcggcagcggccaccaccttctgggcggcttcttccatcgtgtcggccgagatgatgggcaggcccgagtcggccagcatcttcttgccgaggtcttcgttggtgcccttcatgcgcacgaccagcggcaccgtcaggtgcacggccttggaagcggagatcacgccttcggcgatcacgtcgcaacgcatgatgccgccgaagatgttgaccaggatggcctgcacgttcttgttgctcagcatcagcttgaaggcttcggtcaccttctcggtggtggcaccgccgcccacgtcgaggaagttggccggctcgccgccgaacagcttgatggtgtccatggtggccatggccaggccggcgccgttcaccaggcagccgatgttgccgtccagcgagatgtaggccaggtcgaacttcgaggcttcgatttcgttggcgtcttcttcatccaggtcgcggtaggcaacgatttccgggtgacggaacagcgcgttcgagtcgaagttgaacttggcgtccagcgcgatgaccttgccgtcgccggtcaggatcagcgggttgatttcagccagcgaagcgtcggtttcatagaacgccttgtacaggccttgcagggcctggcgggcttgcgccacgctcgtgtcgggcacgccgatcttgcgggcgatgtcgtcggcttcagcgtcggtcaggccaaccgacggctcgatgatcagggtgtggatcttttccgggctgtgggcggcgacttcttcgatgtccatgccgccttcgctcgaggccatcagcgcgaccttctgcgaaacacggtccaccaccagcgaaacgtacagttccttcttgatgtcggcgccttcttcgatcagcagacggttgaccttcttgccttccgggccggtctggtgcgtgaccagctgcatgcccaggatgttcgaagcgtaggtcttgacgtcgtcgatgctcttggcaaccttcacgccgccgcccttgccgcggccacccgcatgaatctgagccttgacgacccacaccgggccgccgagcgtttctgcggccttcagggcctcgtcaaccgagaacgcggggatgccgcgcggaaccggcacattgtatttgcgcaggatttccttgccttgatactcatggatattcatgcgtgtttcctttcgggtaggcgtaaaaggtagaagggaagaatctgaaagaagacgaactctctcgtcaggctggccaatcctgagaatcagccggaggtgccggtcggccgctcggccgggacagcgtcgttgccatcattgccgcggtcgccattggccgcgggcggcgcctgaggcgcagttgcgacggcaggtgctgcctcggcccgtaccttgggcgtcggctggtgaccataccagcgcgggtaaaactgacgaaccacctcgccatcgaaacgcagggcgtggcagccgttcaactgatagggcggctccggattcgggtcgtcctcgccgttgtcgcggatattgatgacttcaccggcaaaggcctggatcgccgtgctgggcagcacgccagcggcctcggtcaggtgtgagcaaccgtgcatgccgcccaggcgctcgcgcacggccttgcgaaagcccttgcgcaggttcaggccgatcagcttgcggtaagccgggccgatcgtgtcgcaatgagatggatacggcacccagtccgagcaggcctcggcatccagcaccgtcatttcctcattgatcgtgacgcgcaaccacaggtcgtgcaggggctggcctaccgggcggacgcggtcgccggccagttcgatgtcgcgaggcttggtgtcggtcaggcgcacctcgatatcccacaagccgtcctctctctggtacgcctcggccgtaatggcgcgacggtgacgctgggagcggttgacgggctgggacagaggcatggccaggctggaaatacgggggctggggaacggcggtgccggagcaccgaaaaccgggggagtttaacatgccgcgccgctttggccgggaacatccttgtgcagcaactgtcgcagcgggattgtcggccgaccatggcgcatcaggcctcgccaccgtcgtcgccgtagtcttcgtccgcaccctggatgatcttgccgacgaccgaacgcgagaacccgcgcgccaccatgaagcggatctgcctggcccgcgcttcgggcgtgtccggcggggtgccgaagcgcttgcgccagacctcacgggcgcgctccacttccgtggcgcgcagccgctcctgcagatcgcccagttgctcgctgccgagcttgtgggtcttggcttcctgcatcacgcgcgcggtgccgtagcgggcgccgcggcggtgcaccaggctgtcggcaaagcgctggttcgacagccagttctcgcgctccagcgcgtccagcaactgctccagctgctcggccgactcggcatgcggcgccagcttgcgcgccagttcggcgcggctgtgctcgcggcgagacaggtagccgacggcgcgggccttcagcgaaagcgggggacgggttgccatggttgccggaatctgtggatggaggggtccgcgccaagcaaaaaggccggggcatcggcgatgccccggccttccggatggcgcaatggccgctggcgcggtcagtcttcgaccgctaccggcgtggcagccgccgtggggttcatggccaccacgcccagcgccgcgcgcaccttgttctcgatttcgtcggcgatgtcagggttctcgcgcaggtattcgcgcgcgttgtccttgccctggccgatcttgtcgccgttgtagctgtaccaggcgccggacttctcgacgatcttggcgtccacgcccaggtcgatgatctcgccctggcgcgagatgccctggccgtagaggatgtcgaagaaggcttcgcggaacggcggcgagaccttgttcttgaccaccttgaccttggtctcgttgccgatcacgtcgtcgcccttcttgatcgagccgatgcggcggatatccaggcgcaccgaggcgtagaacttgagcgcgttgccgccggtggtggtttccggcgagccgaacatcacgccgatcttcatgcggatctggttgatgaagatcaccaggcagttggtgcgcttgatggtgccggtcagcttgcgcagcgcctggctcatcaggcgggcctgcaggccgggcagcgaatcgcccatttcgccttcgatttcggccttgggcaccagcgccgccaccgagtcgatcacgatcaggtcgatcgagcccgagcgcaccagcgcgtcggtgatttccagcgcctgttcgccggtgtccggctgcgagatcagcaggtcgccgacgttgacgcccagcttgttggcgtagctgacgtccagcgcatgctcggcgtcgataaaggcgcaggtgccgcccagcttctgcatctcggccacgacctgcagcgtcagcgtggtcttgcccgacgattccggaccatagatctcgaccacgcggccgcgcggcaggccgccgacgccaagcgcgatgtccaggccgagcgaaccggtggataccacctgaatgtccttctcgacctcgccgtcgcccaggcgcatgatcgagcccttgccgaactgcttctcgatctgggagagcgcggcggcaagcgccttctgcttctcggcgctcacgccggcacctgccttcttgtcgtccatggtcgtccttgaatcaatggtgtataaataggccgcatgtggcgcggcaccggcattttccggctccagcgccggcccggctgtctgcgcggccgctctccagggggtctccccgggcagccccagcggaacgtgcgggtactgtataaaaaaacagtatgcttggcaagccccatcgcgccccattccgccggcgccggctatgccggccagggtggagacaaccatgcgcattctgatcgccgaagatgacgacgtgctggcggacggcctgacgcgctcgctacgccactcgggttacgccgtcgaccacgtcaccaacggcctggaagccgattccgcgctgtcgacccagaccttcgacctgctgatcctggacctgggcctgccgcgcatgtccgggctggaagtgctcaagcgcctgcgcgcgcgcggcgccatgctgccggtgctgatcctgaccgccgccgacagcgtcgacgagcgcgtcaagggcctggacctgggcgccgacgactatatggccaagccctttgccctgtccgagcttgaagcgcgcgtgcgcgcgctggtgcggcgcggcgccggcggcggcgccacgctgatgcggcacgggccgctggcctacgaccaggtcggacgcatcgcctatctcaacgagcagatgctggacctgtccgcgcgcgagatcgggttgctggagatcctgctcacacgcagcggccgcctggtatcgaaagagcagctggtggaccacctgtgcgagtggggcgaggaagtcagcaacaacgccatcgaagtctacgtgcaccggctgcgcaagaagatcgaagtcggcggcatccgcatcgccaccgtgcgcgggcttggctactgcctggagaaattccagccggcggtggccacgcatcactgatccgaccccaccgcaggccacgcgactgacctgagcgcaacctcgccgagatgagcctgctgcgactgccctggcggcgcgtgccccgccccgcgcccccccctccttccgccgccccggccccggacactaccgaccaggacctggccgacgcgttgccgcacctggaggaaagcgcggcaaattccgcgccgcgctcattgttcggtgagatcctcgactggatgctggcgccgctgctgctgctctggccgatgagcatcgcggtgacctacctggtggccaagtcgatcgccaacgggcccttcgaccgcgcgctggaagccagcgccatcgtgctgtcgcagcaggtgcgcgaggtcaacgggcgcatcacgctgcagctgccgctgtcggcgcgcgagatcctgcgcgccgacgagaccgacaacatctactaccaggtggtcggcaagcgcggcgaatacatcgccggcgaccacgacctgccgctgccgtccgaggaggaccagggccacgcggggctggtgtccctgcgcgatgaccgcgtggccggcaacgacgtgcgcgtggcctacacctatatcgacctgaagcaggtcagcggcacccagccggtgctggtgcaggtggccgagacgctggacaagcgcgcgcgcctggccaacgagatcatcaagggcgtgatcctgccgcagttcgtgatcctgccgctggcggtggtgctggtgtggttcgggctgtcgcgcgggctggcgccgctgaccgcgatccagcagcgcatccgcgcgcgcaaccccggcgataccagcccgatcgacgaacgcgccgcgccgcaggaaatcacgccgctggtgggttcgttcaacgacctgctggcgcgcctggaccagtcggtgcagacccagaagcgctttatcgccgatgccgcgcaccagatgaagacgccgctggcgggcctgcgcatgcaggccgagctggcgcagcgcgagcagtcgccggaagagctgcggcgctcgctggcgcagatcgccggcagctctgagcgcaccgcgcacctggtcacgcagctgctgtcgctggcgcgcatggaaaacctggcgggcaccggcggcatggccgcgctggacctggcggcgctcgcgcgcgaggtggtcaaggactggctgccgcaggcttgggcgcgcgacatcgacctgggcctggatgccgacgaacatccggtgatggtgcaaggcaaccgcctgatgctgaccgagatgctgaacaacctgctcgacaacgccatccgctacacgccgcgcggcgggcacgccacggtgcgcgtcagcgccgatgccttcgagccgttcgcctacctggatgtggaagacaccggcccgggcattgcgccggccgagcgcgagcgcgtgatggagcgcttctaccgcgtgctcggcaccaataccgaaggcagcggcctgggcctggccatcgtgcgcgagatcgtgcagcagcacggcggcgacgtccagatttccgaccacgtctaccaacaatcgccacggctggccggcgcgcatttccgcgtgacgctgcgccggcccgactacctgccgcccgcatgaacgacagccccgcccccgatagtgccgaagcccgccagcgccaggcctggcggcgcaacctgcgctggatctgcggcctgctcgcgatctggttcaccgtcaccttcgtggtggcatggtttgcgcgcgacctgcgcttcgacttctttggctggccgttctcgttctgggtcggcgcgcaaggcgcgctggtggtctacgtgctgatggccgcgctctacgcctggcgcatgaaccgcgccgacggcgaagcggacgccgatagcctggccgcgcccgcccctgcgccttcgcagggcgcctcgcgcggaacaggcactgatgctgcatagccgcagccctgcaaagcgcgccattccgccacacaagtgaattgcgccccgcagcgcagcagccaagctcgcgcccacggctagcgtataccccgatattctttgacgattccgtgccccgttctgtcagaacgcagtaagtttcgccacccacaatcctctgcaactcaggcatagcggccagccgcgcggtctttcccgcgccacgcccacccgagatccattccagacggaggagacaatatggcaaacgtgcaaaacgttgcggtgcccgcagggggcgcgcagaacgcaccgatgacagccgaagagcgcaaggtgatctttgcctcatcgctgggcacggtgttcgagtggtacgacttttatctctacggctcgctggcggcaatcattgccaagcagttcttcgccggactggatcccacctcggccttcatcttcgcgctgctcgcattcgccgccggctttatcgtgcggccgttcggcgcgctggtgttcggccgcctgggcgacatgatcgggcgcaagtacaccttcctggtgacgatcctgctcatgggcctgtcgaccttcatcgtcggcctgctgccgggctatgccaccatcggctgggccgcgccgatcatcctgatcgcactgcgcatgctgcaaggcctggcgctcggcggcgagtacggcggtgccgccacctacgtggccgagcacgcaccgcacggcaagcgcggcgcctatacctcgtggatccagaccacggccacgctgggcctgttcctgtcgctgatcgtgatcctgctgtgccgcgaaatgaccgggcccaacttcgagacctggggctggcgcatcccgttcctggtgtcgatcctgctgctgggcgtgtcggtatatatccgcctgtcgatgaatgaatcgccggcgttccagcgcatgaaggcagagggcaagacctccaaggccccgctgaccgagtccttcggccagtggcgcaacctgaagatcgtgatcctggccctgctcggcctgaccgccggccaggccgtggtctggtacaccggccagttctatgcgctgttcttcctgacccaggtgctcaaggtcgatgccaagacggccaacctgctgatcgccggcgcactggtgctcggcacgccgttcttcatcttcttcggctcgctgtcggacaagatcggccgcaagtggatcatcatggcgggctgcgcgctggccgtgctgacctacttcccgctgttcaaggccatgacccactacgccaacccggctctggagcgcgcccagaagagcgcccagatcgtggtcaccgccgacccgaagcagtgctcgttccagggcagcccgatcgcccgcgagatcgacttccgcagctcctgcgacattgccaagcgcacgctggcccaggcatcggccagctatgaagtggtcgaggccccggccggcaccgtggccacggtcaagatcggcgacaaggagatcaaggccttcgacgcgcagctggtgaacggccacagcttcgacgagcccagcaagaagcagatcgcggcgttcaagaaggaggttggtgaatcgatggcctccgccggctacccgaccaaggccgacccggcacagatgaacacgatcatggtgctggtgatcctggtcatcctggtgatctacgtcaccatggtgtacggcccgatcgccgccatgctggtggagctgttcccgacccgcatccgctacacctcgatgtcgctgccctaccatatcggcaacggctggttcggcggcctgctgcccaccatctcgtttgcgctggtggcccagaacggcaacatctactacggtctctggtacccgatcatcatcgcagccatcaccttcgtgatcggcgcgctgttcatccgcgagaccaaggacgtgaacatctacgccaacgattgagcagtcgtccggcactaacggaaacggcaggccatccggcctgccgtttttttatgcatgggcccttcgtgcaaaatcttcacacgaaggtgttgacagcatcgaaagcccaggtataatctcagtcttcgttggcgaattagctcagtcggttagagcgacggaatcataatccgcaggtccggggttcgagtccctgattcgccaccatctatttaaaaagccgcgatcccgcatgggttcgcggctttttgctttgggtcgttaccagggcgcgcaaacgagagccgcccatcatggggcggccacagacgacgcttaccagtaacgcacgcgcccggtatcgatgtgcacgaactggtcagactcatagaagccgacgcccccgccctgcaatgacttggccgcgtcgcgcacgtccgccagcggcacgccggccaggcggatgtcgatggccttgccgtccatgtgcaggctgtgcctggccacgccgccgccgcgcgtgttgcgcaggcgcgaattggtggtcggactgcggtagccggaaatgacctggaacggctggtcggtgccaagctcgcggcggacctggaacagcaggtcgaacagttgcgggtcgatcatgccgaccttgccggaatagtggtcgcgcaggaagccgttgagcgtagtcagcgcgtcgggcacgaagcggtcgccaacggcatagaccaacgacacgcgttcgccggtgtgggtgtggtcgaacgccagcgtgcgggcgtccggcaggccagccagggcccggtttgcaggcaggcctgccagcgcctggcgcggcgccagcggcatcaggccggcggcaagggccaggcctccggcggtatgaagaaagcggcggcgtgcctggcgcgtcgcatcagtcatggtacttcctctgaatgtgccagtggcgcctcagcgggtggtgccagaggcgcttgcaatagctggttgctggggccgtccgttgcgttgccgcagtgccttctccagcaatttgtcgtgaccgtaaatgtcaggcaagaaggatacacgaccatcggcgcgcgcaatgaccgtgccgtaggccagcaccaccggcaagggctgctgcaggcgcaccgtattggacttgccacgcgtcatcgcttcgcggatccgggtctcgttccagtccggcatatcgtgcaacacgaactgggccaatgctactggggcttccacgcggatgcagccatgactgaagtcgcgccggccgcgcttgaacagctgcggcgagggcgtgtggtgcaggtagatgttctcgttgttgggaaacacgaacttgatatcgcccagcgcgttcagcgggcccggccgctggcggatgcgcatgcggccgttcagcactgcctcgagattttcctcggacagcgtggtcacggccttgccgtcgccggtgacgaactccaggccctgccggttgaaataggccggatcgcggcgcaggtgcggcacggtctcgcggcgcgcgatcgagggcgggatgttccagtacgggctgaactcgatgtagcgcatatcctcctcgaacaacggcgtgcgcgtatccagtgccttgcccacgatcaccttcatctcgagcttgatgtcgagcttgccgtcgcggatctcataggcgcgcagcatgaattccggcacattgaccacgatcatgcgcggaccgtccagcggcgtccagcgcagccgctccatggtcagttcgatttgccgcacacggctggcgatgggcaggttgagttgtgccagcgtggccgcgccgatcacgccgtcggcctccaggccgtggcgcgactggaacgccttgacgccgtcgaccagggtcccttcgtagcgggccggcacctgggtgccggcgggcaggtcgcccagcgcaaccaggcgtgcagccagcgccgcggcaccggcccagggctggcccggcgtcagcttgctcgccggcaagggtggcagcggctgcccccaggccggctgcttcgcgatctcgcggtaccgcgccagggcctcccgcagcgtgccatagagcgggaaggtgggcgctgcctggcggatggcatcgggcagccgttgctgcctgacggcatcgcgcagccagatggcggcatcgaagggccgttccgcctgcggggcaaagttggcatggaccgcgcgcgggttgacgcgcccgccgtgcaggtctgccagcatccgctccatcgcggcgctcagcgccgcatccacgcgtgcggcagcgtccggcggcaatgctggcccgctggcggcctgggccacggcctggcgcaaggcgtcggcatcgtagtcgcgcgggtcgaggccgtcggccgcggccgcggccagcgcatcgacggcctggcgggccgccggcaccggtcggccctgcgcaaaccacatcggttcgttggcgaaggcaggcgtggcctggcatgcggcggcacaggcaagcacgacagcgcccaggcggcgtgcggcggcattcagggtcggtggcatcgggcgaaaagttcggattcgtcacacacgccaacagtctacccgcgatggcggcatggtgccgcaagccgcccggggtgcgcgttaccacaccagctgatgccggcgcgcgtagtccaccatttcgaccagggagccgacattgagcttggccatgatgttggccttgtgcgtgctgaccgtcttgctgctgatcagcagttgcgccgcgatcgacttgttggaatggccgcgcgccaggtattgcaggatggtgatctcgcggttgctcagccgcgcaaagccggattcccgctgctcgccgatctggcgcacggtttccagcgtatgcatgggaaagaccaggtagccgctcagcacaccgcgtacggcctgcatcacctcggccagcccacgctgcttgaccacgaagccatgggcgccggcgcgcagcgcccgcaccgaggccagggtggcgtcgctgtcggacagtaccagcaagggcacggtgggctgcgtcgccgagacgcaccggacaaagtcgatgccgggattgccgaagcactcgatatcgaccagcaccagccccggccgttgctcgcggaccagccggaatgcttcctgcatgccgtccatttccagtacttcaccggcgcccaactcagcgcggatttcagcggacagcgtggtgcggaaccgggagggttcgtcgacgatcagcgcgagatgcaatttgaggctccttaacgacttgcatggcttggcctggtgccaaggttaaggggccggagagatcctgatgcgccgaatcctcgccgcgcagatgcggcaaaatctgcatcagagtcagactcttctgcatcgctgttttcgtatcgatgccgcggtcggcgttacccgttggcagcgtcgaggacttcagtcagcttgcggctggcatccagcgccgcggggaatccgcagtagatcgcgctgtgcaccatcagttcgcgcagttcctgcggcgtaacgccattggcgagcgcgccgcgcagatgcccggccagctcctgcggccggttcagcgcaatcagcatcgacaccaggctgcgctgcttgcggtccaggccgtcgcgagtccagaccgtgccccaggcgaactccgtcaccagttgctgcaggctgggttcggccatggcatgggtctccggtctgggtggatgccgcatggtagccgaaccgatcaagccgattcgagaggccgcggcatcggtgccgcggccccaggtcattccgtgcccgcgggcaggaagcgcggcgccggcgccgaacgcggcacctcgcgctcgccctgccggtacagccgatacgtgccgcgtgcctggttgtgcggatggcgcgcggcctcgtccagggtcagcacgcgcgcaaagcacacgtcggtgccgcccagcaacgcctcccactgagtgcttgacttgcctgcgatgcaagcggcaatgcgggccttcaccgcgggccactgggcacggtcatactgcgtggcggggtcgatgtcggtcagctcgagccgctcgagcagctcgcggtagaactgcggctcgagcgcgcccagcgtgatggcgcggccgtcggcgcaagggaaaacgtcatagaacggcgaatcgtggaaggggctcggttgcgggccgccgagcgtgccggctgcgcgcgacacctgcaccagcgagcccagcatggcgacgatatcggtgatggccgcatccaccacgcagccctcgccgcttgcgcgcgcgctcaggatggcgctggtgatgccgaatgccaggccaagcgcgccggtggcatcgcccatcacggtcggcggcaccatcggcagtgagccttcgcgcgcagccatcgacaagaggccggtcagcgcgatgtagttgaggtcgtggccggcgctttgcgacagcgggccggtctggccccaaccggtcatgcgcccgtagaccaggcgcggattgcgtgcatggcacgccttcgggcccaggccgaggcgctccatcgcgcccgggcgcagcccttcgatcagcgcgtcggcgccggccaccaggtccagtgcggcggccacgtcgtccgcagacttcaggttcagttgcaccacgcgcttgccgtgctccagctccatctcaggcggcacgggctggccgcgcaggatgcggcgggcatccggcgcgaccggccgggtcaccagcgtgacctcggcgcccaggccagccagcatcgcaccgcacaacgggccggggccgatgccttcgaattccaccaccttgataccgcgcaggggcagcaggttgccacgctcactcatgatcgtcgtctccggaatcgccgcccgcccgggccatggccgggggacagcttgcattgaattggtatgggatgggccgtgcctgcggcagcgcggacgtgccaatgcctgccgcggggctcgggagcatgctacgcgccacggcgttgacggggcaatggccaaatgcttcagccggcttgacggaatccgtcagccggccggctatcgcacggcgaaatcggataaatccgatccgacttgatctaaatcgggtcctggcaggacactaggtgccatgatggttccagatggcggtgccgcctcatggcgcaccgcctgccgacagcccccatccaggagatttccaacatgaccaatatcgtgctcgccaccgacggttcggccttcagcgacgccgcggcccgttttatcgccgaaggcaagctgctgcagagcggcttcacagtgcatgtcgtgcatgtggcgccggaagtaagcggccaggtgcgcgcctttgtcagcaaggagaccatcgatgactggcacaaggaggccagcgagaaggccatggcgacggtctgcgagatcctgtccgcagccaaggtgccgttcgagcggcacccgctgcacggcttcgcgccggagcgcatcgtcgcctgtgcgcgctcggtcgacgccgcggccattgtgatgggtacgcatggccgcggttcgttcttcgatgcggtgatcggttcagtcgcaggccgcgtgctggcgcaggcagagtgcccggtgctgctggtcaaggcgccggaaaagaagggttgagcaaattagtggaaaaccggcgccctggcggcgccgaccggtagacctcaggcgccccacaggggcgcttcgtccatcagcgccacctgttcgcgcagttcgaggatgcgatcctgccagtagcgcgccgtgccgaaccaagggaacgcggccggaaaggccgggtcggcccagcggctggcgagccaggcgctgtagtgcagcagccgcagcgtgcgcagcgcttccaccagccacagttcgcgcggctggaattcggcgaagtcctcatagccggcaacgatgtcggccagctggtcctgcatggccgcgcggtcgccctcgagcagcatccagatgtcctggatcgccggcgccattcggctgtcatcgaagtcaacgaaatgcgggcccgttgcgccatgggtgccgccgcgcgcgtcgtcctcgccgatccacagcacattgccgcgatggcagtcgccgtgggtgcgcagcaggcgcacctcgccggcgcgctcatagcagcggcgcacgccgtccagcgccaggtcggccaccgattgccatgcgggcagcaggtcggcgggaatgcagccgctggcgagcagccagtcgcgtggggcaacgccgaaggtttcaagatttagcgccgggcgcgcctggtagggctgcgtcgcccccagcgcgtggatgcggccgatgaagcggccgagccaggtcagcgtgtcggaacggtccagcgccggctcgcggccgccgcagcgggggaataccgcgaaacggaagccggcgtgatgcagcagcgtgccggccgcgcccggtgccagcaccatggccggcacggccgggatctcggcatcggccagttgctgcacgaaggcgtgttcttccaggatggccgcatcggtccagcggcccggacggtagaacttggcgatgaccggcgcggcatcttcgatgcccagctgccagacgcggttctcatagctgttgagcgccagcaggcgcccgtcggggcgcaggccggcgccttccagcgcgtccagcatcagctccggcgtcaggccggcgtagggaacgccggggtcggccggggtgtcggacgcgtgcatggtgtcagcctgtcccgctcagcgcgccggcttgcggttgccgccgagcagcgcggcctgcggcgccggacggcgattgcgcgccggtgccggggccgcgtcgtgcggctggcgcgcgggttgcgccgcggcccgttgctggcgcgccggctcctggccgtcgcggcgcggtgcgggattgcgcgcgccgccggcgggctggccgccacggttgccgttggctgcaccgttgccgcgctggccgccctgggcttgccgcggcgcagcctgcgcttcgcgcgccgggcgctggcgctgggcgccctcaccttcgttgccggccggacgcgcctgggcgcgtccgcggccctggccttgtccttgcccctggccaccaccgccacgctgttggcgacccttctggatcggctcgggtgcgatgctcgggtcgacctcgaagcccggcagcacagtctgctcgagcttgcgcttgatcaggcgttcgatatcgcgcagcagcgcaatctcgtccacgcagaccagcgagatcgcttcgccctcggcgccggcgcggccagtgcggccgatgcggtgcacatagtcctcgggcacgttgggcaggtcgaaattgaccacgtgcggcagctggtcgatatcgatgccgcgcgcggcgatatcggttgccaccagcagccgcagcgtgccggacttgaattccgacagcgcgcgcgtgcgcgccaactggctcttgttgccatggatcgccagtgccgacaggccgtccttggtcagctgctcggccaggcggttggcgccgtgcttggtgcgggtgaacaccagcacctggtgccagtcatgctgacgcaccaggtgggccagcagttcacgcttgcgctcgcgatccaccgggtagacgcgctggtccacggtctcggccgtggtattgcgccgcgccacctcgatcgaggccgggttgttcagcaggcggtctgccagcgcgcggatgtcgtcggagaacgtcgccgagaacagcaggttctggcgcttggccggcagcacgttgaggatcttgcggatatcgtggatgaagcccatgtcgagcatgcggtcggcttcgtccagcaccagcagttccacctgcgacaggtcgatggtgcgctgggacacgtggtccagcaggcggccgggcgtggccaccacgatctcgacgccgcgcttgagctgctcgatctgcggattgatgccgacgccgccgaacatcaccatcgagcgcaggcgcaggtacttgccgtagttgcgcacgctctcctcgacctgggcggccagttcgcgcgtgggcgtcagcaccagtgcgcgcaccggcaggcgggccggacgctgcgcgccattggcgccgcgcgccgcggagtcggacagcagctgcagcatcggcagcgtaaagccggcggtcttgccggtgccggtctgcgcgccggcgagcaggtcgccgcccttgaggatggcggggatcgcctgggcctggatgggagtcggcgtggtgtagccctgttcggccacggcacgcacaatcttgtcggacaagccgagttcagaaaaagacatgaattgctgcttgggccatcgctgcgcacgcggtgcgccaaacgccggatggctcctggtaatcggatcggaatcggaacgcgaacgccgggaagccggcacggcagggcaccggcccgcccgcgaaggaaagagcggtagtgtaccagtccgggaccagcgggttctgcaccgcgcgcggccccgcatgcgcgccggcgcacatcgggtctgcgcgggtggcgctgcgctatcatgacagcctctgcccgcccctctccggctccgcacccgctccacatgtgccccggaaagccgccatgcgcttgcgtttcctcgaagaccaggaagtcaccctgttcgcggccatcccggtcgggatcgtcgcggccattgccaccacgctgttcaaggaggcgctggatggcgcgggcgtggtcctgttttccagccatgccgacgtggtcgccgtattcgccacgctggcgctggcgtggcgtgtggtggtgccggccgtgggcggcgcgctggcgggcagcctgctggtgctggccaatcgcctggccggcagccacggcggcgccaccgactacatggaagcggtatccagcggcagcggccgcctgccggtgcggatcaccttgctgcgcgcgctctcgtcatttttctcgatcgtcagcggcagttcggtcggcaaggaaggtgcgatgatccagctggcggcgctgtgcggctcgctgttcccgtcgacccggctggaacgcggcggcggctcgaacatgcgccgcatgctgaccgcctgcggggccgcggcgggccttgccaccgtttatcacacccccttctccgctgccgtcttcgttgccgaagtggtgttcggggcgctcgcggtgcagcgcctgatgccgctcttcctggcttcggtggccggtgccatggtcagccagtggcacggcggcctgcagccgctctacccgggcctggatatcgcccccgacctgcgcccgcacatcctgctggccgcggccgcgctgggcgtggccgccggcattgcgggcgcgctgttcatgcgtgcggcgggctttgcgcgcagccgctttgcagcgatgcctggcggcccggtggcccggctgacgctgggcggggcgctggtcggcgtgctcgcgatggcggtgcccgaggtggttggcaacggctattccaccatccagaccatcctgcaggagcagccgctgagcgtgccggtggccggcgtgctgctggccaagctggtggctacggtgatcagcatgggctcgggggcggtcggcggcgtgttcacgccgtcgctgttcgtgggggcggcgctcgggcagttgctggccatcggcatgcagggcacggcggccgctgcggcgccgctgctgccgctggtgggcatgagcgcgttcctggcggccaccagccaggcgccgctgatgtcggtgttgatggtgttcgagatgacgctggcgcccgcgctgctgctgccgtcgatgatcggcgcagtggcggcgtactacaccgcgtcacgctgccagacgctgtcgctgtacagcgtgatcgccgagcgcgcgcaggcctcggccgcggccgaacacgcccgcacgctgacgctggcgggcctgtgcgacccgaccgataccgtgctcgaccccaacgccaccctgtcggccgcagccgacaagtttgccgagaccggcacgcgctacctctatctggtcgaagcggatggccgcctgctgggcgcgctgtcaatccatgcgctgcagcgcgcccagcgcgagggcgccgcggacgacgtgctggcgctggccgagcgcgacttccccgcgctgacgccggattcgcgcctgcgcgacgccctggcggtgtttgccgagcacggcatcaaccgcatcccgctggtgcgcgacagcgccggccgcgaactgatgggcacggtgtccaagcagcgtgtgctgcaagaggcatcctgcctgttctgagccccgccgcatcgccgacccggccaggccgccagcggggtaaaatgccgggttgcgcccgcctttgggccattcccgccaacgcgtcgtcccatttgtcggagttctcccccatgccagcaggtcgtgatgcgcgccgcgaggcgccggagtctgttcaacccgggcgcgcccgcaggctgttgccagcgctggcctgcgccgccgccctgctgctcggtgcggcaagcgcgatggcccagccggtgcgggcgatcccggacgatgcgcaggcggccaggctcgttatcgccacgccgtctgccggtgccccgcagacggccacgctcgacggcaagaccgtcggcgtggcgccgggcctgcgcctgttcggctccgacaaccagttgctggccagtgccgcggtggcgggccagaagctgccggtgcggtacaagctggacctgtacggccagttgctgaccgcgtgggtgctgagcgagccggaacagaaggcgctgaagaagaaatcgtagtcccccggaagtgcgaccggcgcgccccacgcgccggccgtgttgttgcaacaccctgatgcccccaggtcaaccactgagatcggcatatgaagaaagttttcgtcaagacgtacggctgccagatgaacgagtacgactcggacaagatggtcgacgtcctcaacgccagccaggggctggaacccaccgacaacgtcgaagaggccgatgtgatcctgttcaacacctgctcggtgcgcgagaaggcgcaggagaaggtgttctcggaactgggccggatgaaggcgctcaaggccgtcaaacccgacctggtgatcggcgtgggcggctgcgtggccagccaggaaggcgccagcatcgtctcgcgcgcaccctatgtcgacgtagtgttcggcccgcagacgctgcaccgcctgcccgacctgatcgcgcgccgccagcgcaccggccagtcgcaggtggatatctccttccccgagatcgagaagttcgaccacctgccgccggcacgcgtcgaaggcccgagcgcctttgtctcgatcatggaaggctgctccaagtactgcagctactgcgtggtgccctatacccgcggcgaggaagtgtcgcgcccgttcgaggacgtgctggccgaagtcgccggcctggccgaacagggcgtgcgtgaagtcacgctgttgggccagaacgtcaacgcctaccgcggcaagatgggcgacaccaccgagatcgccgactttgcgctgctgatcgagtacgtggccgagatccccggcatcgagcgcatccgctacaccaccagccacccgaaggaattcacctcgcgcctggtcgagctgtacggccgctgcgacaagctggtcaaccacctgcacctgccggtgcagcatgcgtccgaccgcatcctgatggcgatgaagcgcggctacagcgtgctggagtacaagagcatcatccgcaagctgcgcgtgctgcgcccggatatgtcgatgtcttcggactttatcgtcggcttccccggcgagaccgatgccgacttcgagaagctgatggcgatgatcgaagagatcggctacgacacctcgttctcgttcatcttcagcccccgcccgggcacgcccgctgccaacctgcacgacgacaccccgcacgaggtcaagctgcgccggctgcagcgcctgcaggccaccatcgaggaaaacgtgcagcgcatcagccagaacatggtcggcacggtgcagcgcatcctggtggaaggccccgcgcgcaaggatccgaccgagctgcacgggcgcaccgagaacaaccgcgtggtcaactttgcgctgccgggcgtgccgcaggcaggccgcgaccggctggtcggccagctggtcgatgtcagcatcacgcaggccttcccgcactcgctgcgcggcgagatcgtggttcggcagtaaccaggcaccatccagcgaggccatcgccaaccgatgaaagtcccttccgcagaattcgtcgcccccaaggacgacaacacccggctgcagaacctgtgcgggccgctcgacgagaacctgcgccagatcgagcaagcgctggacgtgaacatccagcgccgtggccaccgcatgacggtgcgcggcggcaacgcgcaggatgcggcaacggcgctggagcgcttctacaaccaggcgcgcacgccgctgtcgatcgacgacgtgcagctgggcctggttgaaacgcgccagctgtccgcgcatggcagctacctgcccggcaacggcgacgatgtcgaagagcgcgagatcggcgacgaatcgccggtgctgcacacgcgccgcaccggcctgcagggccgcaccgtggcgcagcgcgactacctgcgcaatatcctgtcgcacgacctgacgctgggtgtcggcccggccggcaccggcaagacctacctggcagtggcgtgcgcggtcgatgcgctggagcgcgacgcggtcaagcgcatcgtgctgacgcgcccggcggtggaagccggcgagcgcctgggcttcctgcctggcgacctggcgcagaaggtcgacccctacctgcgcccgctgtatgacgcgctgtacgacctgcttggcttcgaccgcacgcagaagatgttcgagcgccagatgatcgagatcgcgccgctggcctatatgcgcgggcgcacgctgaaccatgccttcatcatcctggacgaggcgcagaacaccacgcccgagcagatgaagatgttcctcacgcgcatcggcttcggctccaaggcggtgatcaccggcgacaccacccagatcgacctgcccagggggcagaagagcggcctggtggaggcgctgcacgtgctgcgcgacgtgcgcggcattgcctgcacccgctttaccagcatcgacgtggtgcgccatccgctggtggcccgcatcgtcgatgcctatgacgaataccacgcccagcacaaggacgcttaattgaaatcccagaaatccaagtcttccgccgtgagcctgaccctgttcgacggcgacggccgcgcgcgcaagagcgccgcgcacgcgctgcgcgtgcagttgcccgacggccgcagcctgacgctggacctgtcgcaggccgccgacggcgtggtcgcgctgctggccgagcacaccgacaccaaccagcaggctggcctgctggtgcgcccggacaaccatgactcgctgtcggtggccgtgaccgccacgccggtggtcaccaccaccggcacgccggccaccccgcccggactcgaactcgagatccagaacggcgacggcgtcggcaagcgcgccggcctgccgccgcgccgcaagatcgagacctgggtcaagtcggcgctgtatgccgacgccgcgctgaccatccgcttcgtcgatgaggaagagggccgcacgttgaaccgcacctatcgcggcaaggattacgccaccaatgtgctgacctttgcctatgcggagaacgaggaagacccggtcacgggcgatatcgtgctttgctgcccggtggtggaaaccgaggcgcgcgagcagcgcaagccgctggaagcgcactatgcgcacctgatcgtgcacggcgtgctgcatgcgcaaggctacgagcacgaggaagacgccgaggccgaggaaatggaggcgatcgagaccgaaacgctgcaggcgctcggttacgccgacccttaccagggcgatcgcaccgtgtgatccccgcgtaattcctttctcacgggcggcgccgaccgggcgccgcctgctgcacatattgtcgcagaccaccgcccgccgtcacgggacggccaggcttttagtgtatccttcagacgatctccaccacgcgctcgccgcgaaatgaacgacccttatcccagttcgaagcccgcttacctgaagcaggccgatcggcccagatcgcttctcgaacgcctgtcagacctgatttcccccgagccggacacccgcgcggaattgctcgaagtgctccaggaagcgcatgagcgcaacctgatcgacgccgactcgctgtcgatgatcgagggcgtgttccaggtctccgaactgaccgcgagcgacatcatggtgccgcgcgcgcagatggatatggtcaatatcgcggatgccccggaggcgttcatccccttcatgcagcagaccgcgcactcgcgcttcccggtctatgaaggcagccgtgacaacatcatcggcatcctgctggccaaggacctgctgcgctactacaccgaccccgccttcgacctgcgcgagaccctgcgcccggcggtgttcatccccgagtccaagcgcctgaacatcctgctgcgcgacttccgcatcaaccgcaaccatatcgccatggtcgtcgacgagtatggcggcgtggcaggcctggtgacgatcgaggacgtgctggagcagatcgtcggcgacatcgaggatgagttcgacctggacgaagaccaggacaatatcctgccgatgcccgacggcagctggcgcgtgcacggcctgaccgagatcgcccagttcaacgacgccttcggcaccgccttctccgaccacgatgtcgataccgtgggcgggctgctatccaaccacgtgggccacgtgccccaccgcggcgaggtcatcaccctgccgccgatccgcttcgaagtgctgcgcgccgacgcgcgccaggtgcacctgctgcaggtgcaccgggaatccaacggcgacaacgcgggcgcggccggcgcatgaagcgttccgccccgatcctcaacggcgccgccgctgccgacgccgccccggcgggcgtgcctggcacgcgcgcgcattcgcgcacggcgaccatggcgcggctgctgctggccggcgtgctcggcatcgcccatacgcaagcctttgccccccatgactggtggtggctgcagatcctgtcgctggccggcctggccgcgctgatggccgacgcgccgcgcgcgcgcctggccgccgccactggctatgccttcgggctgggctggttcctgtccggcatctggtggctctatatcagcatgcacgtctacggcgagatgccggcgtggatggccgcgctcgcggtggtgctgttctcgggcttcctgtcgctctacccggcactggccggcgcgctgtggcatcggctgacggcgcgcctgccccgggccacgctgctggcgccgctggccttcggcgctgcctggggactcaccgaatggctgcgcggcgtggtgtttaccggcttcccgtggctgtcgggcggatatgcccatgccgatggcccgctggccggcttcgcgccgctgcttggcgtgtacggcatcggcgcgctggcagccgcggtggcggcactgctggcggctgcagtacgcgggctgggtcgcggcgagcgcggccgggcgctgggcgccctggcactggcactggccctgcccgccgcgggcgccgcgctggcgccgctggcctggaccacgcccgccggcaagccgctgttggtgcggctgctgcaaggcaacgtggcccaggacatcaagttcgagcccgccggcatccagcgctcgatcgagctgtaccgcgacatgatcaccgccgcgccggccgacctcgtggtcacgccggaaaccgcgttcccggtcatcctgcaggagctgccggtcgacgtggccgtggcggtgcgcgactacgcgctggccagcggcaccacggtgctgttcggcgccgccggcgccgactcgccggtggacttcaccaacagcgtcttcggcctgggccccgagaccgaacgcctgtaccgctacaacaagcaccacctggtgccgttcggcgaattcatcccgctggggttccgctggttcgtcgacatgatgaagatgccgctgggcgacttccgccgcggcgggctcgaccaggcctcgctgccggtgcgcggcgtgcgcgtggcgcccaatatctgctacgaggatctgttcggcgaggagatcgcgcagacgctgcgccagcagccggcgccggccaatgtcctggccaacctgaccaacctggcatggttcggcgacaccatcgcgctggaccagcacctgcagatctcgcgcatgcgcgcactggaaacgcgccggccgatgctgcgctcgaccaataccggcatgaccgcggtggtgcgtccggacggctcggtgcagcaacgcctgccgaccttcacggtcggcacgctggcggccgaggtgcagggcatgcaggggctgacgccctatatccgctgggggaacgcgccggtgctggcgctgtttgcactggtgctggggcttgctgcctggcgtgtgcgcaagctgcgcggtgcaggctgaaggcacaggctggcgcaggcaccggacccggcgggatcgccgccaccgtccggcgctggattgcggtgccggtggtggcgcctcaggtgggcgccagccggttcagttcagcagcccggtcgccacggacacggtggccgcggcgatcatgaccgcgattgcgaccaggtaaggtttgcgagaaagaagtgccatgatgccaagtccccatcaataatcagttaccgacaaacggctactgcggtgccagccagcagccgccgtgcccgccatgccggcacggactgtcaatcgcaacgctctgaaacgggttgcttactcatactgtatacaaaaacgttatcggccagcagcggccaaacctgaaatccgcctcggtattttcccgatgcgttgcgtaggaccgacattggcggacatcctccaccatcggtgcgtgacctagccggccccgccaaacggggcgcctcgccaaaaagccgatagaattcagggtttggcaaaatccgcatgcgccggctccggcacgcgccgcgcggcctgcatgccgggcgccgcgaccgcgcccgggtgcctctacctagtcttcatatgctgaccttccaacaaatgattctgaccctgcaggcctattgggaccggcagggctgcgcgctgttgcaacccatcgatctggaggtcggcgccggcacatcccacgtacacaccttcctgcgcgcgctcggccccgagccgtggcgtgccgcctacgtgcagccgtcgcgccgccccaaggacggccgctatggcgagaaccccaaccgcctgcagcactactaccagtaccaggtggtgctcaagcccgcgccggagaacatcctggagctgtacctgggctcgctcgaggcgctcggcctggacctgaagcagaacgacatccgcttcgtcgaggacgactgggagaaccccacgctgggcgcctggggcctgggctgggaagtctggctcaacggcatggaagtgacgcagttcacctacttccagcaggtgggcgggatcgactgcaagcccatcaccggcgagatcacctacggcatcgaacgcctggcgatgtacctgcagaaggtcgagaacgtctatgacctgatctggaccgagtgggtcgagaacggcgagacgcgccgcctgacctatggcgacgtgtaccaccagaacgaagtcgagcagtcgacctacaacttcgagcacagcaacaccgagatcctgttccgccatttcgccgagcacgaaggcgaagccaagcggctgatgggcaacggcgatggcgccgaggaaggccaggccgccggcacgcgcctggcgctgcccgcctacgagcaggtgctcaaggccgcccacaccttcaacctgctggacgcgcgcggcgcgatctcggtgaccgagcgcgcggcgtatatcggccgcatccgccacctgtcgcgccaggtggcgcaggcctactacgactcgcgcgaggccctcggcttcccgatgtgcggcaacggcggagcccgggcatgacgcaactggcgcgcagcgcgctgtgctgcgccatggcgatcgccgcgctcgccgccgccggcaatgccatcggcgcgcgcgcgcaggcggcacccagcgcgcaggtgctgatgctgccggccgaactgagcaatgtgtgcgaggccgatccgcaggcgctgcagctggccatggcgcgccaatggcgcccgtcgctgaacgcgctcgaccagtgggcgcagctggtgcgctcgttctcgtgcgacctgtccggccagcgcgacctggggtggcaccgcgtgccgctgcgcgcctatgaaagcgcgatccgctacccgctgacgtgggttgagatggagacccgcaacggccgcacccgccgcacggtcaagacttactattcggcggcgcagctgccgccgaagatcgatttctgggtgggcgggcgcatcgacgagatccgctacgacaagcgcctgcgccgcatcgacgcacgcttcccggctgcaggcagccgcggcggcagcaacggcgcggccagcgccgcggcggccgcgcaatgcgcctacaccacgctgcaattccggcaacagaacggcctgtggctgctgtccggagtggaacctaatctttcgccgcgctgctgacaagcggcgcgcgctacaacctgttggatacgattcatgtcgcaacccatgaccgactcgctgctgatcgaactgttcaccgaagagctgccacccaaggcgctggcgcgcctgggcgacgccttcgcgcagggcctgttcgccggcctgggcgagcgcgacctgcttgagccgggcgccaccgtgacgccgttcgccaccccgcgccgcctggccgcgctggtgtcgggcgtgcgccgcagcgcgccggaccgcgagcagcgcgagaaggtcctgccgctgtcggtggcgctggacgccaacggcgagcccaccgcgccgctggccaagaagctggctgcgctggccaagtcggtcggcgttgccgagatcgactggcagtcgctggagcgcgcctccgacggcaaggccgaggccttcttctaccgctataccgcgcgcggcgccgaactggctgccgcggtgcaggcagcgctggaagacaccattgcgaagctgccgatccccaaggtcatgagctaccagcgcccggacggcagcaccgtgcatttcgtgcgcccggcgcacagcctgatcgcactgttcggcgccgagatcctgccggtgacgctgctggggctgcaggccagcaacctgacccagggccaccgcttcctgtcgcatggcgtgatcgagatcgcgcatgccaatgattatgcgcagcggctggaatccgccggccacgtggtcgccagctacgccgagcgccgcgagcgcatgcgcgccgcgctgctcaaggaagccggcgccgaccaggtgatcatgcccgagtcgctgctcgacgaagtcaattcgctggtggaatggccggtggtctatgcctgccatttcgaggaagccttcctggcggtgccgcaggaatgcctgatcctgaccatgcagaccaaccagaagtactttgcgctgaccgatgccgacggccacctgcgcaaccgcttcctgatcgtgtcgaacctggccaccgagacgccgcagtcgatcatcaccggcaacgagcgcgtggtgcgcccgcgcctggccgatgccaagttcttcttcgaccaggaccgcaagaagacgctggcgtcgcgcgtgccgcagctggccagcgtggtctaccacaacaagatcggcacccagctggaccgcgtgcagcgcctgcagcagatcgccggccatatcgctgacgccctcaacggcagcggcgtgccgaccgacaaggccgccgcgatgcgcggcgccgaactggccaaggccgacctgctgaccgacatggtcggcgagttccccgagctgcagggcaccatgggcacgtactatgcccgccacgacgacgaagccgaagacgtggcactggcctgctccgaacactaccgtccgcgctttgccggcgatgcgctgcccgcaggcgcggtcagcaccgccgtggcgctggccgacaagctcgagaccctggtcgggatctggggcatcggcctgcagcccaccggcgagaaggatccgttcgcactgcgccgccatgcgctgggcatcctgcgcatgctgatcgaaaagccgctggcgttgtcgctgtcgtcgctgctggcgctgacgcagcaggcctttgccggcatcgctgcagtcaagccggcacccgacgcaatcgccgacttcctgtacgaccgcgtgcgcggctacctgaaggacaagggctacaccaccaacgaagtcgaggccgtggtcagcctgcgcccggaccagctgcacgacatcctgggccgcatggaagccgtgcgcacctttgccgcgctgcccgaggccgaggccctggccgccgccaacaagcgcatcaccaacatcctgcgcaagaacaccgagccagtcggcgcggtcgatccggcgctgttccgggaagaggccgaaggcgcgctgcacgccgccatcgagcgcgtgcgcccggccgtggaagccgccttcgccagcggcgatttcaccgccgcgctgcgcgacctggcccagctgcgcgatgccgtcgaccgcttcttcaatgatgtgatggtgatggccgaggatgcgcagctgcgcgccaaccgcctggcgctgctggcttcgctgcacgcgatggccaaccgcgtggccgacatctccaagctggccgcctgatctcagccaccggagccgcacatgccgcagacgccgcccaagtttgtcatcctggaccgcgacggggtggtcaacctcgacagcgaccagttcatcaagacgcccgatgaatgggtgccgatcgacggcagcctggaggccatcgccgcgctgaaccaggccggctaccgcgtggtcctcgccagcaaccagtccggcatcggccgcgggctgttcgagatgagcgcgctcaacgccatgcacgagaagatgcacacgttgctcgcgcgcctgggcgggcgcgtcgacgcggtgttcttctgcccccataccgccgcggacggctgcgactgccgcaagcccaagcccggcatgctggagcagatcagcgagcgcttcggcatcgagctccgcggcgtgcccatcgttggcgattcgctgcgcgacctggaagccggcgtggcggtcggttgcgcgccgcacctggtacgcagcggcaagggccagaagaccctcgaccagggcgccctgccgccgggcacgcaagtgcacgacgacctgctcgcgtttgcgcgctggctgaccggcaacggcggcgcacagcgcccacccactcatagcgccggctgaccgcccgcatccattccctattcgcacccccgcccccccgcatgacgtttctccgttccctgttgtttgcgctgtacctgctggtgctgacgccgccgtacgcttgcgcctgcttcctggtgttcccgttcatgaatgccgaccagcgcttccgcttcgtgcgcggctggcccctgctggtgatctgggccgcgcgcggcatctgcggcatccagtaccgcattgaaggccatgagcatatggacgtgatgctcgacaagccggtggtgctgctgtccaagcaccagtcagcctgggaaaccgtggcctacgtggcgctgatgcccaagccgctgtgcttcgtgttcaagcgcgagctgctgctggtgccgttcttcggctgggcgctgggcatgctgaagatggtccatatcaaccgcaaggaaggcacccgcgccttcgcctcggccgcgcgtcagggccgcgagcggctggccgaaggcgcctggatcatcatgttcccggaaggcacgcgcacgccttcgggcctggagaaggcgcgctacaagagcggcggtgcgcgcctggcggtggaaaccggcgcctgggtgctgccgatggcggtcaactcgggccgggtgtggccgcgcaattcgttcctgaagcacccgggcatggtgacgatctcggttggcccggcgatcgcctcggccaacaagaccgcggaccagctcaaccaggaggtggcggaatggatcgagcgcgatatgcgccgcatcgatccgcagagctaccggagcgcggccccgggcgggcccgccgcatgaagctgctgcgacccgccaccgacgccgacggcgcgcagctggagctgccgctggcggagtccgcccaggcgccgcagcctgcggccccgcctgcgccggagccgccgcagcagcccgcctggccggtgccgcaacccaatgcacgcctgctgcgtatcggcgaacggccgctgcactacacgctcaagcgctcggcgcgccgcaccatcggcttcaccatcgacgaccgcggcctgtcgatcacggcgccgcgctgggtcacgctggcggacatcgagtcggccatcctagaaaaacagcgctggatcttcaacaagctgggcgagtggcgccaccgcgagtcgcgccgcatcctgcccacggtgcaatggcgcgacggcgccagcctgcccttcctggggcagccgctgacgctgtcgctggagtcgccgctcggcgcgctgctgttcgatgccgaccgtcgcgtgctgcacctggcgctgccgggccatgccgacgagcagcagatcaaggaccgcgtgcagggctggctgcagcagcaggcgcgccggctgctggccgagcgcctcgatatctacgccgacaagctgggcgtgcgccacaccggctttgcgctgacctcggctgccacgcgctggggcagctgcaccgccgacggcaagatccggctgaactggcgcctgatgcatttcccgctgtcgatgatcgactatgtcgccgcgcacgagctggcgcacctgaaggaaatgaaccacggcccgcgcttctggcagaccgtggaatcgatcttccccgagttccgcgatgcgcgcgcgcaactgcgggcacacccgcccgagctgttgccgactttctgagcgggcgggagcgggccggtacgtttcggccaaacgcactaaaatggcgccttcctatacctaaaactgttgaaggccctcaaatgcgactcctccacaccatgctgcgcgtcggcgacatgcagcgctccatcgatttctatacccgcgtgctcggcatgcagctgctgcgccagagcgacaaccctgagtacaagtaccgcctcgccttcgtcggctacggccccgagagcgagaccgcggtgctggagctgacctacaactacggcgtcgaccagtatgacctgggcacggcctacggccatatcgcgctggagaccgacgatgccgcggccgcctgcgagcgcatccgcgccgccggcggcaaggtcacgcgcgaagccggcccggtcaagggcggcaccaccgtgatcgcctttgtcgaagacccggacggctacaagatcgaactgatcgagcgccattcgacccgcgacgccaggcgtccctgacggacgctggcgatgagcacgcaagccctgacccggcagccgctcgacggcatcgccgtgggcctgatggtggtgctgtgcgccgcctggggcctgcagcaggtggtgatcaaggtcaccgcgccgctgatgggcgcggtgctgcaggccggcgtgcgctcggcggtggcggcgttgctggtgttcggctttgccgcctggcgcggcacgccgctgtggcggcgcgacggcacgctgaacgccggcttgctggccgggctgctgttcggcgcggagttcttctgcatcttcgtcgggctgggacacaccacggcctcgcgcatggcggtgttcctgtacaccgcaccgatcttcaccgcgctgggcctgcatttcgtggtgccgggcgagcgcttgcacagggggcaatggctgggcgtggcgctcgcgttcgcgggcatggcgctggcctttgccgatggcattgccgcgccgtcggcgcagggcagcacgctgccgggcgatgcgcttggcatcctcgccggcgcactgtgggccgccaccaccttggtggtgcgcgccagcccgctggccagcgccccggccagcaagaccctgctgtaccagttggcggtgtccgcggtgatgctgctggcgatggcggtggccgccggccagaccgcaaccgtgcagatcgacggggtggtgctggcgagcctgttctaccagtcagtgctgatcgcgtttgccagctacctgacctggttctggctgctgcggcgctacctggcgtcgcggctgtcggtattttccttcctgacgccgctgttcggggtcgccttcggcgtcgtgctgatgcacgacgcggtgggcccgcgctttgccgtggcggcactcctggtgctggccggcatcgtgctggtcaatcgccgcgcctgagcggcgcggcaagcgcaatactgcggcggccggagccgcccctgcctgacgctcagcggcgtgcctcgaacgagaacatgccgagcgcgtcgcgcacttcgtccagcgtctgctgggtcagtgcgcgtgccttcgcggtgccctggcgcaggatgtcgaacacatagtccggatccttggccagttcttcgcggcgcgcgcggatcggggccagcatgtcctgcaggatgccctcgacgcggcgcttgagcaccatgtcgcccaggccgcccttccggtagtgctccttcagcgccttgacttcctcggtgttggggtcgaacgcatccaggtaggtgaacaccacgttgccctcgacctggcccgggtccgacacgcgcaggtggttggggtcggtgtacatgctgtgcaccgcagccttgatctgctcgggcgaagcccccagcgcgatcgcgttgcccagcgacttgctcatcttggccttgccgtcgacgccaggcaggcggccgaactcggggatcagggccttgcattcgggcagcacttcgcggccgacctggtggttgatgcggcgcacgatctcgttggtctgctcgatcagcggcgcctggtcttcgcccaccggcaccacgtgggccttgaaggcagtgatgtccgcggcctgcgatgccgggtagcacaggaagccggccgggatgtcgcggccaaagccacgcgcctggatctcttccttgatggtcgggttgcgctcgagccgcgccaccgtgacgaagttcaggtacatcagcgtcagctcggccagcgccggcaggtgcgactgcacggtgatggtggtcttggccgggtcgatgcccacggccaggtagtccagcgccacttccagcacgttgcggcgcaccttgtcgggatcgtgcgcgttgtcggtcatggcctgggtgtcggccagcagcacgtattgctcatgcgtgtcctgcagcgtcacgcggctcttcagcgagccgacatagtggccaaggtgcagcgggccggtgggacggtcgccggtcaggatcacgggacgccggttggtttgggtctgggctgtcatgggacggtcttgcacgaaatagtcgcgggaaattcgggaatcgggatgcgcgggcctcaggcggcctgtccggcccggccggatggcgtaccaccgaggcgccgggccagttcgacatattcgccgacgggcacttcctcggcgcggcggccgaggtcgaagcccatcgcatcgaagtcgacctggtcgcgcaggaacgagagcgtgttgcgcagcaccttgcgccgctgcgagaacgctgcagtgaccacgtcgcccagcacggtgatgtcgcaatcggcatgcggcgaacgcagccggccgtcgctgtggcgcggccacgggatcatgcggaccacggcggaatcgaccttgggcggcggattgaaggcgcccggcggtacgtccagcacgtgttccatgtagtagcgcacctgcagcatgatcgagagccggccgaaggccttactgccgggttcggccaccatgcgctccaccacctctttctgcagcatgaagtgctggtcgcgcacgtggtcggcgaaatccatcaggtggaacagcagcgggctggagatgttgtacggcaggttgccgacgatgcgcagcgggcggccgggcacggcgagcttgtcgaaatcgaacgccagcgcatcgccggcgtggacctgcaggcgctcgccatagcggcggcgcaggcgctcgaccagatcgcgatccagctcaaccacctgcatctgcgggatccgttcgagcagcgggtcggtcagcgcgcccaggccggggccgatctcgaccagcacgtcgtcggcctgcgggctgatggcattgacgatgccgtggatgatggtgtcgtcgaccaggaagttctgcccgaatcgtttgcgggccacatggccctggtgcacgtttgaacgcatgggttattcgtccagcttcagcatggcggctgcaggccggaatgggtgtggccaggatggctgcccgtggcaccgttgctgccagggcgccggccattggcgtggccggccatggtgaccgcactgcggatggcctcgatcatgctgccgtgttcggcctggccggtgccggcaaggtcgagcgcggtgccatggtccaccgaggtgcggataaagggcagccccagcgtgatattcacgccgtggccgaaggtgccgtatttcagtggcgccagcccctggtcatggtacatcgccagcacgcagtcggcatcgcgcaggtggcgcggctggaacagcgtgtcggccggaaagggtccgcgcgcgtcgatgccggcatctttggcctgcgccagcgcgggcgtgatgatgtcgatctcttcgcggcccatatggccgctttcgccggcgtgcgggttcaggcccgtgaccaggatgcgcggccgcgagatgccgaagtagcggcgcaggtcggcatcgatgatcgacagcgtctgcaccagcagcggcaccgacagcgcatcgggcaccgcgcgcagcggcaggtgggtggtggccagcgccacgcgcagcatggcgccgtcgtgcgcgggctgcggaccggccagcatcatcaccacgcgcggcacgcgggcgctctcggccaggtattcggtatggccggtgaaggggacgccggcgtcgttgatggtgctcttctgcaccggcgccgtgatcattgcggcataccggggcgcggccttgccgcgcgcgcggcagccgcggatggcggcatcgagcagcttcagcacataggggccgttgcgcgcgtcgagccgcccggcctcgcacgcgaccgccagcgggatgtcctcgaccaccacgtcgccgtcggcaatgcgccgctcccaggcgtgcgtggcgcccagcgccgcggcgcgatcggccagcaggcgggcatcgcccagcacatggaagcggtattgcccgccgccgacgccattgttggcgcccgccagctgcagcaacgccccgatggtgatatcgggaccgatgccggcgggttctccggtcgagatggcaagggctagcgggtcgggcatgtcaggtcagcggatcggggaccggcgcttcagcgctgccggttgacccggtactccacgtacgcctgcgagcgcagctggcgcacccagtcatcataggctgcgcgcagcttctgttcgcggacttcggcacgggcgaagtcgcgctgcttctcgggcgacatctcggtctcgcgccggttgagcacctggatcaggtgcacgccgaactgcgtgaccaccggctccgagatctcgttcgggcgcaggcggctcatcgcctgctcgaactcgggcaccagctcgcccggcgagacccagccgaggtcgccgccgttctgcgccgagccgtcctgcgagaaacgcttggccgcgtcggcaaaatcgccgccgtgggttatgcggtcgcgcagcgtgctgagctggcggcgcgcctcggcttcgggcatgttggggccggtgcggatcaggatgtggcgcacctgggtctgggtgatcttcgaggccgcggccgggctggatgccggcgccgcgcgcttggccaccagcttgaccacatggaagcccgccgcgctttccaccacctgcggcgccaccccgccagcctgcaggtcgaccacggcgttggcgaacagtgccggcaggcggccgatctcgcggaagcccatcgcgccgccctgggccgcctcggggccctcggaattggcctgcgccagctgcgcgaagtcggcaccgccctgggcctgcttgagcagcccttcggccttggcgcgctgcgcctgcttctgtgcgtccgaggcattctcgggcacgcgcacgaggatctgcgccacgttgtattcggtcgggccgctggcggcgccctggccgccgcgcgccgccaggtagttgtcgatctcgccgtcgtagacctgcaccttggaatcgacctcgcgctcgcgcaggcggatcacctgtacctgcttgcgcagttcctcgcggtacttggtccaggtcatgccactggcctcgacgcggcggcgcagctcggtcgcgttcagccggttctgctgtgccaccgattcgatggcgcggtcgatttcctggtcggtcacgcggatgccggcctcctgtgcggcctgggtctgcacgcgctccattacgaggcgctcgagcacctcgcccagcaggtcggcgcgcgcgggcaccgggcggccggcggcacgcagctggccttcgatctcgtcggcacggtcgagcagctcgcgccgcgtgatcacgctgttgttgacgactgccaccacttcgtcgaccagttgcgaacgcttctggccgccggcctggggcacgcccagcttgggctggctcgacggcgtcgcgacgtcagacgcctgcggcacgaagatgccactggagcgcggcgccgtcccgggcgccttgagctgcgcggcagccggcaccgtcatggcggccagcacggccggcagcagcaagcgatgccaggacgtcaggagaaaggaaaacacggcgaattcttgacgtttcatcgtaatccgtcattcatagtgatcgaactgggtcgtcggcaccggcttggccgacacgggctcatagccgggcacgttcaggcgcaggatgttcaacgggttggaaccgatcttggaaaggccacggaactccacctgcaggaagacccgcccggtgtagccttgcgtggtgttgcggaagcgctggtagaccacgcggccgacccagcagtcggcggcgtactcgacgccggccagcgcatcgaccatctggcttgcggccaggtcgaaggcaaagcgtgcgatgccgtaggcacggcgcgtgatcggccactggcttgacacctcgaactggtcgatcgcggtgttgtcggtcaccgaggtcgggcggcggtagcggtagcctgcgttaatcaccttgcgcgactcgggccggtaagagaccgccacgttgccgtagttgatccggtcgctgtccgggttgtactgcacccccgcgtccaggtaatagccgcggaacatctggatggtggtggccgccagcagatccgagaaacccgccttgggatccgccagcgtgccgttgatctgcacgcgctggccggtgaagtcgtagcgctgcgcgatggtgccgcggaagcgctcgattccggtgtcggcttcgatcaggcgcgtggtcaggccgccggtcagcttgttgttgtcggcgacgcggtcgtagccggtgaacgggttctcgctgaagatctgcccgtagccgaagtcggactgcaccgtgtcgaacagcgggaactggctctggtcgcggaacggggtgtacacgtagaacaggcgcggctccagcgtctgcacatagttcacgccgaagaggcggctgaccgtcggtgcctcgcgctcgaatgtcatgcccgagtccaggctcatggtcggcagcacgcgcgagaaattattctgcaccgtaggcgtgttggaggccgcctccatctggtactgggtcgcgttgaaggtgaccttcggcgtcacgtaccagcccgcccgtacgatcgggtagctgatgctcggctggataaacatgcgctcgccctgcggctgctggaagccggtggacgtcagcggaatgcggaagcgcgtgtagtccgcttccacctgcacgtcgaagccgcccaggtcatagcggatgtacttgccgttgagctgcggcacgcgctcgtacgacggctcgcttgggcgcagcgtctggaacttctgcacccgggccaggaacgtgaaatcctgccagttataagtaacgccgccttcctgcgtgtactggcgcagcgtcgattgcgacacgctgcggttgaaatcgtccgggtactggtcgtccgatacccggttcacattcaggtaggcattgagacccttggccaggttctggttatgctggatcgagtaggcccagcggttcgaattggtcttcttgtcgtccggcaggaactcggcgcgcaggcgcccgttgtagccctggcccagataacggtattcgccgccgagctgcaggccgcgctccgtcatcagccgcggatagatggtcaggtcgcggttcggcgcgatattgacgtagtatggcgtggtcaggtcgaagcccgaacgcgagccgtagcccatcagcggcggcaggaaaccgctgcggcggtcgtcgttcagcggaaagctgaacgccggcgccgcagcaatcggcacgccgaagaaattcagcacgccgccgtaggccacgcccacctggcggtcgttgtccaggtcgatccggttcgcgctgaaataccagtcggcgttgtccggcgaacaggtggtgtatgacgcgtgcctggcggtgctgcggtccttgtccaggaagtcgatgcgctcggccttgcccgagccgccggtctgctggaaataatagtccggcgacagcatatagccttcgttggcctcgaccttcatccgcgcctcgggaccgaccgccagcgtgccgctgcgcgacatgcgcacattgccctgagcaaaggcttcgtcggtgtcctggtcgtaggtcagcttgtcgcccttgatcgcaccgccgtcacggcgcagctcggcatggccttccagctcgacgccgcgctcgctgtagccggtcatgcggtcggcctcgataaaggtcggggcgtcggagccggcgtcagactgtttgccgggttcggcaagccgcggcaccagttcgccggattccaccggaagcggcggcgctttcggcgcggcttcgaacaccggctcgacctggtcgagatcggggatcgccgaaccggacatctgcgcgtgtgcgccggccgacaggctggccatggccagcaccagcggccgcagtgcgcccgcgtgcaggccgccggcgcgcctggctcgggcaggaacgctggttggggcaggcgaaggcaaggccctgttgttcggtgatcgtcgttgttcggtcattcgcacgggttgtcagtctcggcgtcggctgcggcccgcctgcaagccgccagcccccgccggagcaggctgcggggcaccgaatggccccacccgggggccgcccggcgcccgggtctggtcgggtattatacggggcaacctagggtcgccttcccgcttactttcggtttcatttacgtttccactctgcgcccgttccccacacgtatctgtatggcagctctcccccacgacccgcgcctggaccagctcaaggcctgggtatccggacttggcccgacttggtccgccgatcccgattcctgcgcccccgcctcggccgacgccagcttccggcgctatttccgcgtcagcaccggccatccggcgcatcccaccgccatcgtgatggacgccccgccggcgcacgaggactgccgcccgttcatccacgtatgcgggctgttcggcgcggccggcgtgaccgtgccgaccgtgctggcgcaggacctggagcagggtttcctgctgctggccgaccttggcaaccagacctacctgtcgcggctcgatgactccaccgcccacgccatgtacgccgacgcggccgccgcgctggtccgcatccaggccgccacccgccccggcgaactgccggcctacgaccgcgcgctgctgcagcgcgagctcgacctgttcccgcagtggtatgtggccaggcacctgggcgccactctgaccgaggcccagcaggcggacctgcgcgaagtgactgaagcgctactcaccaatatccttgcgcagccgcaggtctacgtgcaccgcgatttccactcgcgcaacctgatggtgctcgatggcggcgccaacccgggcgtgctcgacttccaggacgcggtgatcggcccgatcacctacgacgcggtctcgctatggcgcgacgcctatatcgaatgggacgaggagcagcagctggactggctgatccgctactgggagcgcgcgcgcaaggccggcctgccggtcagcgccgactttggcgagttctatcgcgattttgagtggatgggcctgcagcgccacctcaaggtgctgggcatctttgcccgcctgtaccaccgcgacggcaaggacggctacctcgccaacctgccgctggtgatgaagtacacccgccaggtggccggccgctacaccgaactgcgcaagctgatccggctactggacgcgctcgaaggcgtggccagcccggccggctacacgttctgacgccgtgcccgacaaccagcccgttctgcgcgaccaccgcgcgcccgccatcaccgccgccggcgaatggctggccggcgcgcgcgcgctcgcgccgatgctgctgggcgtggtgccgttcggcctgatctacggcgtgctggccgtcggcgccggcatgccggcgtggctggcctgcgcgatgagcgtggtcgtgttcggcggcgcctcgcagatgatcctgacccagttgtggaccgccggcaccccggcagtggtgatcacgctgacggtggccatggtcaacctgcgccatgcgctgtattccgccaccatcgcgcccacgctcgcgcacctgccgcggcgctggaaggcgctgatcgcctacctgctgaccgacgaagcctttgccgcgatgacgcaccggcttggcgacagcggcccgcgcgcccgctaccgccactggtactacttcggcggcggcttcgcgctgtgggccagctggcagctgtcgacgctggccggcgtgctggtcggcgcccaggtgccgcgcgactggccgctcgacttcttcctgccgctgaccttcatcggcatcatcgtgccgggcctgaagcaccgctcgcacgtggccgcggcgctggccgccagcgtgctggcggtggcctgctacagcctgccgcacaagctcgggctgatggtggcggcgctcggcggcattgccgtgggcatgctgctgctgggccgcggcaaccgccccgggcaacgcccggccagccgtggcgccgatgccacgccaggcggaacagccggcaaggaggccgcatgagtgcgatgaccctgctgtgggtcttccttgccgcgggcctggcaaccttcctgatccgcctgtcgttcatcgccgtggaaggccgcgtgcggctgccgtcgtggttccgcaccgcgctgcagttcgtgccggcagcgatgctgtcggcgctgatcgcccctgacctgctgatgcagcatggcgagcttgccctcacccccgccaacgcgcggctggtggccggcgtggtggccatcctgatcgccgctcgaacccgcagcgtgggctggaccatcgccggtggcatggccgcgctgcttgccctggaggctctgttctgatgaaggccatgatcttcgccgccggccgcggcgaccgcatgcgtccgttgaccgatacctgccccaagccgctgctggcggtgggcggcaagccactgatcgtctggaagatcgaggcgctggcgcgtgccggcctgcgcgacatcgtcatcaaccatgcctggctgggcggacagatcgaagccgcgctgggagacggcagccgttttggcgtacggctggcctattctgccgagggcactgcgctggaaaccgccggtggcatcgcacaggccctgccgctgctgtccgcgcacccggagcgcggcgagatcttcctggccgtgtcgggcgacattttctgcgactacgacttccgcaggctgttgcctcgcgcgcacgacatggccggcgcgcccgccccgcgcatgcacctggtgatggtgcccaacccggactttcacccgaacggcaacttcaccttgcaaccgaacgggctgctgacgctcgacgggacactggccaacggtggcgaacggctgacattcggcaatatcggcctgtacgacacgcgcctcttcaccgccatcgaacctggcaccaaaatgccgatgacaccctactactgggaggccatcgaggccggcgccgctaccggcgaacgcttcgacgggcgctgggagaacgtgggcacgccggcgcagctggccgagctggatgcggcgcttgcgacagcagcgcctgtggcggcgcacgggcgctaggtcgactgactgggcgggggctggcaaggcgcccggacgatcccgcggccagcgaggcgccagcggcggtagaatcgccctgatcctcctcatcccaggccctaccatgtcctcacccgacaacgccctcctcgccgcctgccgcgaccgccgcgcccgtgtgctgcagcacctgcgcgccggcggcggcggtgtggcgatcctgcccacggcgccggaagccatgcgcaaccgcgacagcgactacccgtaccggcacgacagctatttctattacctgagcggctttaccgagcccgaggccgtgctggtgctggtggccggcgcgccgggcgaccccgccgatgccgaccgcagcatcctgttctgccgccccaagcatgaagagcgcgagatctgggacggtttccgtttcggcccggatggcgcgcgcgccgtgttcggcttcgatgaagcgcattcggtcgaagagatcgacgccgcgctgccgccgctgctggccaaccgcgcgcagattgcctacccgctggccgactcgacccgcaccgacgtgcagatgcggcgctggatggacgccgtgcgcatgcagggccgcgccggggtcgccgcgccgtcggttgcgctcgacatccgcaccgtgctcgacgaaatgcgcctgttcaaggatgccggcgagctggccaccatgcgccgcgcggcgcagatctccgccggcgcccatgtacgggccatgcaggccacccgtgccggactgcgtgaataccacctggaggcggaactgctctatgagttccgccgccatggcgcgcagagcgtggcctataactcgatcgtcgcggccggccccaacgcctgcgtgctgcactaccgcgccggccccgccgaactgagggacggcgacctctgcctgatcgatgccggctgcgagttcgacggctacgcctcggacatcacccgcaccttcccggtctcgggccgcttctcgccggcgcagcgagagctgtacgacctggtggtggccgcgcaggacgccgccatcgccgagacccgcgccggcgtgccctacaacgtgccgcatgacgccgccgtgcgcgtgctggcgcagggcatgctcgataccggcctgctcgaccgcaacaaggaaggcacgctcgacgacgtgctcgccagcggcagctaccgccgcttctacatgcaccgcaccggccactggcttggcatggatgtccatgacgtgggcgaataccgcgtggccagccacggcggcgaaggcgagcgcccgtggcggccgctgcagccgggcatggtgctgaccatcgagcccggcatctatgtgcgcccggccgaggacgtgcccgagcgctactggcatatcggcatccgcatcgaggacgacgccgtggtcaccgacggcgactgcgagctgatcacgcgcggcgtgccggtgctggccgacgagatcgaggcgctgatgcgcgataacgccaatgctgccggaggtctgcgatgatcggctggctgcgcaggatctttccgggccaggcccgcagcggcagcaatgctggcagcgaccgccggcccgatccgtccgaacccttcatcatcaacctgtacgacgaccgcgtggtggtgcaccgccccgacggccagcgcgaggaagtcgcctgggacacgctcgagcgcgtggtggtccgggtgtccgaccgcgcgccctgggccggcacggcctggctgatcctgatcggcacgcccgattcgggccagggctgcgtggcgccgctgaatgccgccaaccatggtgcactgcttgagcagctgcgcgcactgccgggtttcaaccaccagaagctcgagaacgcgctgcgcgacgccgcggccggcaaatcgcgctcggatgcgatctgctggaagcgcgatgcggcagcaccaacggaggcggatgcgggtcatgcaggaggcagcgacgatgccggccgcgcagcctgatttccaaagcctgcgcgatatcgccatcgtcggcggcggcccggtcgggctggcgctggcctgccagttgctccgcactaccagctggcgcctgacactggtcgatgccgccacgccggcgcgcgccgcgcgcgatccgcgcgcgatcgcgctgtcgcatggcagccgccagctgctggagcagatcggcgcctggccggtgcccggcagcccgatcgagcatatccatgtctcgcagcgcggccgcttcggccatgtgcggctgcaccatgacgactacggcgtgccggcgctcggttacgtggtccgctacggcgacttgtgcgaggcactggagcgcgcgctcgcccatgccgcgcaggcggcgggcgaaggccggctgcagcgtgtgttcgagacccgcatcgaccagatcgcacaggatcctgcgccgagcgccgcggacgatcccgatgccggcgccgtgcaactggccggcaccggccacgacggccaggtggcacacctggccgcgcgcctggtggtgcaggccgagggcgggctgttccaccagcaggccgcccaccagggccgcggcgcgcgcacgcgcgactaccgccagaccgcggtgatcgcccatgtgacctgctcgcgcccgcagccgggctgggcctgggagcgctttaccgacgaaggcccgctggcgctgctgccgcacgaggagcatggcgtgccgggctatgcgctggtgtggtgctgcccgccggaccaggccgcgcggcgcatcgcgctgccggaagcggagttcgcggcggaactgggccgggcctttggcgaccgcatgggccatttcacgctggccggcaagcgccatgccttcccgctcggcctgaatgcggccccggtgaccgtcaacggccgcgtggcggcggtcggcaatgccgcgcaaacgctgcacccggtggccggacagggactcaacctgggcttgcgcgacgccttcgcgctggccgattcgctgcgcagcgcctgcacgccgcaggcgctgcaagccttcgccagccgccaccggctcgaccgcgccgtcaccatcggcgtgaccgacctgctgccacgtgtgttcggcatcgcctaccccctggccgcgcacgcgcggggcgcgtcgctggccgtgctggcctgcctgccgccgctgcggcatgcgctggcgcgccacatgatgttcgggatgcgtcgctgaccccgccagtggcgcaagcgccacgcgcatggcggcgtttgcgccacggcccctgcccggttgcgctccggatgctcaaatcttgggcaatggcgatggtttggcggtagaatcctgccctcgcacatgtcccgatccaaggccggctgcagtttcggcaggggcatgtttttccgtttcgtcttccgtctcagagcaggctgtcccgaccccttccctggcgccatccacgccgcgaggggaacgctacggtcaccgggacggcctctcagaaccgccgcccaaccgtgcagatcggacctcaccaactccgcaacaacctgtttgtcgccccgatggcgggcgtgacggaccggcccttccgccagctgtgcaagcagctcggcgcgggctatgcggtgtcggaaatggtggcgtccaacgcacagctgtggaagagcgagaaaaccatgcgccgcgccaaccacgccggcgaggtcgaacccatcgccgtgcagatcgccggcgccgagccgtcgatgatggccgaggccgcgcgctacaacgtggaccgcggcgcgcagatcatcgacatcaacatgggctgcccggccaagaaggtgtgcaacgtcgccgccggctcggccctgctgcagaacgagccgctggtggtgcgcatcgttcaggccgtggtcggcgcagtgggcgaccgggtgccggtcacgctgaagatccgcaccggctggaaccgcgagaaccgcaatgcgctgcgcatcgcgcacatggtcgaggacgcgggcatcagcatgctgaccatccacggccgcacccgcgccgacctgtaccacggtaacgccgagtacgagaccattgccgcggtcaaggcagcggtctcgatcccggtggtcgccaacggcgacatcaccacgccgcagaaggcaaagcaagtactggcgctgaccggcgcggacgcgatcatgatcggccgcgcggcgcagggccggccctggctgttccgtgagatcgagcacttcctgaagaccggcgagatgctgccgtcgccggaagtggccgagatccgtgccatcatgaatgcgcacctggaagaccactacgccttctatggcgaattcaccggcgtgcgcaccgcgcgcaagcatattgcctggtacacgcgcgggctgcgcggcgccaacctgttccgccaccgcatgaacacactggagagcaccgccgaacaactggcggcggtcaatgcgttcttcgacgagcaggcgcagatctctgaccggctggtgtacgtggacgacgcagcacaagaccaagacgaagcgaacaacaacaaaaacggggagttgcttgccgcatgagccgcaacgctatcgaccagtgtatccgggaaagcctggacacttattttcgcgacctggacggcgaagagccgtcgaatatgtacaacatggtgctcgaggcggtcgaacggccgctgctggaagccgtgatggtgcgcgccgagcgcaaccagtcgctggccgccgcctatctgggcatcaatcgcaatacgctgcgcaagaagctgcagcagcacggtttactttgaatttgaagcgtctcccacagccatgatcaagcaagccctactctccgtttccgacaagaccggcatcgtcgatttcgcgcgcgaactgaacgcgctcggcgtcacgctgctttccaccggcggcaccgccaagctgctggccgacagcggcctgcccgtgacggaggtggccgactacaccggcttcccggaaatgctcgacggccgcgtcaagacactgcatcccaaggtccacggcggcatcctggcgcgccgcgacctgcccgagcacatggccgcgctggccgagcacgacatcccgaccatcgacctgctggtggtgaacctgtacccgttccagcagaccgtggccaaggatgactgcaccctgcccgacgcgatcgagaacatcgacatcggcggcccgaccatgctgcgttcggcggccaagaaccatcgcgacgtgaccgtgatcgtcgacccggccgactacgccgtggtgctcgacgaaatgcgcgccaacgccaacagcgtcggctacgacaccaatttccgcctggccaccaaggtgttcgcgcacaccgcccagtacgacggcgccatcaccaactacctgaccagcctgggtgccgacaagtcgcaccagggccgcagcgcctacccgcagacgctgaacctcgccttcgacaaggtgcaggaaatgcgctacggcgagaacccgcaccagtccgccgcgttctaccgcgacctgagggccgtggacggcgcgctggccaactacgtgcagctgcagggcaaggaactgtcgtacaacaacatcgccgacgccgacgcggcctgggaatgcgtcaagtcgttcgacgccgccagcggcgccgcctgcgtcatcatcaagcacgccaacccgtgcggcgtggcgctgggcgcgaatgcgctggaagcgtatgacaaggccttcaagaccgattcgacctcggccttcggcggcatcatcgccttcaacgtcgagctggacgaaaccgccgcgcaggccgtggccaggcagttcgtcgaagtgctgatcgccccgtcgttcagcgccggcgcgcgtgccgtgttcgcggccaagcagaatgtgcgcctgctggagatcccgttgggccagggcatcaaccagtatgacttcaagcgtgtcggcggcggcctgctggtgcagagcccggacgccaggaacgtgcagccgtccgagctgcgcgtggtgacgcgccgccacccgaacccgaaggaaatggacgacctgatgttcgcctggcgcgtggccaagttcgtcaagtccaatgccatcgtgttctgcggcggcggtatgacgctgggcgtgggcgcgggccagatgagccgcgtggattcggcccgcatcgccagcatcaaggcgcagaatgccggcctgacgctggccggctcggcagtggcctcggacgcgttcttcccgttccgtgacggcctggacgtggtggtcgacgcgggcgcgacctgcgtgatccagccgggcggctcgatgcgcgacgacgaagtgatcgccgccgccgacgaacgcggcatcgccatggtggtgaccggcacgcgccacttccgccactaagcactggcaggcttgcggccttgcctggcaaggccgccggctccgaagcggtttcgttctcctgcaagggaaagcgaaaccgctttttgccttaggtgccggtgcaaaaagcaatacactagcgacggcatccatcctacccacccaatgcgaatcctaggcatcgaccccggcctgcgcaccaccggcttcggcgtgatcgagaagcacggcaacaagcttgcctacgtggcctcgggcacgatcaagagcgacggcaattcaacgttgccggaacggctgaagacgctctacgacggcatcagcgaagtgtcgcgcacctatgcacccgactgcgcggcgatcgagaaggtcttcgtcaacgtcaacccgcagtccacgctgctgctcggccaggcccgcggcgcggcgatctgcgggctggtgggctacggcttgccggtgttcgagtacaccgcgctgcagctcaaggtggcggtggtcggctacggccgcgccaacaaggcgcaggtgcaggaaatggtgacgcggctgctgatgctgcccggccagcccggcagcgatgcggccgatgcgctcggcgtggcgatctgccatgccaacggcagcgataccctgggcacgctgtcgggcctggcgcccgacctggtgcgcaaaggcatgcgcgtgcggcgcgggcggctggtcggctgaacacgccagcggctggcgcttgctgtgcccgcttccccatctcttacaatcgggccttggtctcaccacaggaacgctgcatgcctagtcagtcccgattgagcgcgccgcgccggcgccccagcctcttccctgttcttgccttccggcgttggctgtttccggccgccgcggcctgcgccgcgctggtcgcgggctgcgccaccgcgccgcgccctaagcccgtgtccgcggctccggtgccggcacccgccgcgagcgctgcgcctgcggccgccgccacccagcctcccaaaccgctggtgatcgcccatcgcggcgccagcgcgctgcgccccgaacatacacttgccgcctacgccaaagccatcgaggacggcgccgacgccatcgagcccgacctggtcatgacacgcgacggcgtgctggtagcgcgccacgagaacgacatcaccggcaccaccaacgtggccgaactgccgcagttcgccgagcgcaagcgcaccaaggtgatcgacggcgagcgcctgagcggctggttcaccgaagacttcacgctggcggagctcaagacgctgcgcgcgcgtgagcgcatcccgcgcctgcgcccggacaatgcgcgcctgaacgaccagttcgaggtgccgaccttcgacgagatcgtgcgcctggccgagcaggccgcgctgcgcaccggcaaacccatcggcatctacgcagagctgaagcacccgagctacttccgcggcatcgggctgccgctcgaggacaagctggtggccgcgctgcgggcacaaccctacctgcgcaacgcacccgtgtttatccaatgcttcgagaccggcagcctgcgcgcgctgcggcgcacgcttggcagcgggcagcacaacgtgaagctggtgcagctcatcggcaacccgcgcaagggcccggccgactggaagctggcgggcgacggccgcaccttcggcgacatgctgggcgcgaccggcctgcgcgaggtggcagcctatgccgacggcatcggccccgagaagagcagcgtggtgccgcgcgatgcgcagggcgcgctggctgcgccgacgccggtggtgcgccaggcgcatgctgccgggctgttcgtccatccctacaccttccgtccggaaaacagcttcctgcccaaggtgctgcaggccggcggcgacgacgccacgcgcagcccgtccggcatggagcgggaagtgcaggcctttatcgcggccggcatcgatggtttcttcaccgacgacccggcgctgggccggcgcgcggtggatacgccggcgcgctgaccccggcagggcggccgctgggctacacttgcggccgcctggtccctgacccccaccttccattccctcctccgcaccatgatcggacgcatcgccggcacccttatcgagaagaatcccccgcacctgctggtcgactgccacggcgtcggctacgaggtggacgtgccgatgagcaccttctacaacctgcccgcggtgggccagccggtgacactgctgacgcagctgatcgtgcgcgaggacgcgcacctgctgtacggcttcggcaccgcatcggagcgcaacaccttccgcgagctgatcaagatcaccggcatcggcgcgcgcatggcgctggcggtgctgtcgggcatgtcggtgcccgagctggcgcaggccatcacgctgcaggaagccggccgcctcacgcgcattcccggcatcggcaagaagaccgcggagcggctgctgctggagctcaagggcaagctgggcgcggagctgggccacgtgccgggcacgccggcggtgccggacagcgccgtcgacgtgctcaatgcgctgctggcgctgggctactcggaaaaggaagccgccgccgcgatcaagcaggtgccggcggggaccggcgtgtcggacggcatcaagctggcgctcaaggcattgtccaaggcttgagacctgcataggcgcgtagaatggcggattgttgccgctgtccgggcccctgaccaccatgatcgaaactgacaagcttgccgcccccgcccgcgtaattgccgccacccccgcctcgtcgcaggaggaggcgttcgagcgcgcgctgcggcccaagctgctggacgagtatgtcggccaggaaaaggtgcgcgggcagctcgatatcttcatgcacgccgcgcgcaaccggcgcgaggcgctggaccacgtgctgctgttcggcccgccgggcctgggcaagaccacgctggcccacatcatcgcgcgcgagatgggcgtcaacctgcgccagacctcgggccccgtgctggagcgcccgggcgacctggccgcgctgctgaccaacctggaagccaacgacgtgctgttcatcgacgagatccaccggctctcgccggtcgtcgaggagatcctgtacccggcgctcgaggactaccagatcgacatcatgatcggcgagggcccggcggcgcgctcggtcaagctcgacctgcagccgttcacgctggtgggcgccaccacgcgtgccggcatgctgaccaaccccctgcgcgaccgcttcggcatcgtggcgcggctggagttctataccgccgatgagctggcccgcatcgtcacgcgctcggcgcagctgctgcatgcccgtatcgacccgcagggcgcgctggagatcgcccggcgcgcgcgcggcacgccccgtatcgccaaccggctgctgcgccgggtgcgcgactacgccgaggtcaagggtgacgggaacatcacccgcgccatggccgacgcggcgctggccatgctggacgtggacagcgtcggcttcgacctgatggaccgcaagctgctggaagcagtgctgcacaagttcggcggcggccccgtgggcgtggacaacctcgccgcggccatcggcgaggagcgcgacaccatcgaggacgtgctcgagccctacctgatccagcaaggctacctgcagcgcacgccgcgcgggcgcgtggccacggctgccgcctaccggcatttcggcctggccaacccgcaaggcagcggcgccagcgaactgttcggcgacgcctgacagcacgaagcagcaacagcgccttggcagggccccggcgcagcaccaattaaacgttttaatttcgcgctccaaattttttcgaagtggattgctggcccgtggccgattgtccacaatggctttatcggcaccggcccggtgctgcgatggccgcgccccgccaggcacggcaccttcacaaatacgtcaaggaaagccaatgattcgccattcgtccagcctgctcgccgcagccctcgccgccaccgcgttcgccgccggcagtgccaacgcccagcgcccgccggcgccggtcggcgtggccgaagaggcggtcatcagcggcaagatcgtcgatatcgatcccgaatccaaggccgtgctggtccagggcccgcgcggcaacgtggtcgaactggtggctggcgacgaggcccgcaactttggccagatccgcaagggcgacatcctcaccgtggcgcgtggcgccgcgctggtcgccgcgcttgagccggtcgacagcaaggccaccgcactggccgaatcggtcgaccgcaccacgcgcgccgccgagggcggcaagcccggcatcatgcgcgagatcaccaccacagtgaccgcacagatcaccaaggtcgacccggccaagcgcctgatcaccttccgcggtccgcgcgagacgctgcgcaccgtgaaagtgcaggatccggccatcgacctgaacggcatcaagcagggccagatggccaagatcgtctaccgtgaagtcgtggccattacggtcaaggcacccgcggcagccgcagccaactgagccactgagccagacgcggtacttttcccatcaggaggttacctatgaatcgtcgccactttgttacccgggttgccggatcgggcctgctcgttgccaccgcaatggcggcaggctgcaccaccaccggcaccagcgcctcgaaggacccggtcgccaagaagcaggaaatcgatgcaggggtggacggagcgctgaaccggctgttctccgccaaccccggcgcacgcgacctggcgcagcgtgcgcaaggagtcctggtgttcccgcgtgtcatctcggccggcctggtggtaggcggcgagtacggcgagggtgcgctgcgatcgaagggcgcgacggtcggctactacagcacgacgcaggcctcggtcgggctgaccgccggcgggcagtccaaggccgtcatcatcatgttcatgaccccggaggcctacaacaagtttgttgccagcaagggctggaccgccggcgccgatgccaacgtggcggtggccaaggtcggcgcggacggcaggctcgacaccctgaccagccagcagccggtgattgccttcgtgcagaccaatgccggcctgatgttcgacgtctcggtaaacggctccaagatcagcaagctggatatctgacccggccacccggctgcgccgctccacctgaaattcccggcttcggccgggaattttcatttcaggcggccgcagcaacgcttgcgcatgccgcggcagaatccggggtccgctggcataatcgcgcccaaaacaccgcgcgccagcgcgtccgaccgggagcccccatgtccgccatccccgccagcgcaggccccgctggccgcgtctaccgttactatgacttcgtcatggtggcctttgttaccgtgctgctgtgctcgaacctgatcggcgcggccaaggcggcacaggtgacgctgcccgtgatcggcacggtgaccttcggcgccggcgtgctgttcttcccgatctcctacatcttcggcgacgtgttgaccgaggtctacggctacggccgcgaccggcgcgtggtctgggccggctttgccgcgctggctttcgccaccttcatgagcctggtggtgctgaacatgccggtggcgcccttcatggcggactaccagaaaagcctgcaggacgtgttcggcaacacctggcggattgcgctcggctcgctgatcgccttctgctgcggcagcttcaccaacagctacgtgctggccaagatgaagctgtggacctcggggcggtggctgtggacgcgcacgatcggctcttcgctggccggtgagctggtcgactcgtcgctgttctacgtgatcgcgttctacggcatctggccgctggaaaaggtgatccaggtggcagtggcgcagtacgtgctgaagaccggctgggaagtggtgatgacaccggtgacgtacaaggtggtcgggttcctgaagcgggccgagaacgaggattatttcgaccgcaataccgacttcaccccgttccgcgtccgcgtgtagcgctaaggcacgcgccggtccacctcgtccagcgacaggttttcaaggtggctgacatcgccccactgcgccagcgtcaggtggctgctgtcgctgcgtagccggttgacgctggcattgagcagttcatgctggcgcggtgcttccagcgtcatgccggtggcctcgcggtacaggcagtcaagcacgccaccgtgcgccaccagcgcgatgcgctcgccgggatgccggcgcgacagcgccagcaccacctcgaccgcgcgctcatggaagcccagcagcgactcgccttcaggcggcgcgtagtccggcacgcgcgcctgccagcgggcgaaatcctcgggcaggtgctcggctacttcggcgtaggtcttaccctgcagcgtgccgtagctgcgctcgcgcaggcgcgcatcggggcgcacctgcagcccgagcacctcggccagcggcgcagcggtttccatcgcacgcgacaggtcgctggcatagaccgcatcgatcggctcgcccgccagcgccgtggccagcgcgcgcgcctgggcgcggccggtctcgttcaggggaatgtcgagctggccctgcagccggcgctcccggttccaggccgtttcgccgtggcggatcacgatcaggtgggtataggccagcgaatgcggcccggggctttgcgacatgccgtttccttcgggatttcctttgaggccggcgccgcgcggctggcgcggcgccggccagacgttatttcgccagattggggttcagcgtataagtgccggtgaggctggcctgcgccagcacatggccctggatcgcctcgcgcacctgcgcgccggtgaaggtgccatcgagcggcagccggtcgatgtccagcgcatacagcgtgaacacgtagtggtgcagcagcgtgtcgttccacggggggcacgggccgtcatagccgtagtagtcgcccttcatgtcggcatcgccggcgaaccagccggtgtagtcgttgatgccgtggcgcaggccgcccgcggtggcggtgccgccggtggcttcggggcccggcttgccgcgcgcgatcacgccgtcgctgtgcgagcccgccgcgatcgaggtcaggcccggcgggatgtcgaccagcacccagtggaagaagtcaacgcgcggcagcgcggccggcacttcgcggccttcctggttgacgtcgtcgcccttgcttggcacgtcgcggtcgtggcagatcagcacgaacgagcgcgtctcggccggggcgtcttcccagcgcaggtcgggattgcggttattcgacagggccacgtgggcggcggcgtcgggcacgcagaaggcgaactcgccgggaatcggcgcgttgtcgttgaaggacttgctccagactttcatttgtctctcctgtcttggtgccgcgccggggcgcggcagcttggaatctgttcaggccggcggcacccgcagccagaaggtgaccgggccgtcgttgaccaggctgacctgcatcatcgcgccgaactcgcctgtctgcacctgcggatgggcggcgcgcgcctgcgccacgaaatgctcgtacaggcgccggccgtcctcgggcgaggcagcgggcgtgaaactcggccgcgtgccgctgttggtatcggccgccagcgtgaactgcgaaaccaccagcagcccgccggcgttgccgttgccgtccatgttctgaaccggcaggttcatcttgccggcagcatcggaaaacacccggtacgacagcatcttggccagcagccgctcggcctgcgcctcggtgtcgccgcgctcggcgcagaccagcgccagcaggccggcgccgatttcaccggtggtgcggccttcgaccgtgacgcgggcctgggccacccgctggatcagcgcgatcatcccggccgcctcaggccagcgtcacgcgcgcgaaacggcgcttgcccacctgcacgacataggtgcccgctgccaccctggtggccttgtcgctgaccgtggcgccatcgatcttgacgccgccctgctcgatattgcggttggcttccgaggtggacggcaccaggttggcctgcttgagcagctgcgcgatgcccagcggcgcgccagtcaggctcactgccgggatatcgtccggcacgccgccgcgggcgcggtggttgaagtcttccagcgccttctcggcatcggcctggctgtggaagcgcgccacgatttcctgcgccagcagcaccttgcagtcgcgcggattgcggcccagcgcgatttcctgcttcatcagctcgatctcggccagcgggcggaacgacagcagcgtgtagtactgccacatcaggtcgtccgagatgctcatcagcttgccgaacatctcgttaggcgcctcggtcacgccgacgtagttgcccttggacttggacatcttctcgacgccgtccaggcccaccagcagcggcatggtcaggatgcactgcggctcctggccgtattccttctgcagctcgcgcccgaccagcaggttgaacttctggtcggtgccgccgagctccaggtctgacttgagcgcgaccgagtcatagccctgcatcagcgggtacaggaactcatgcacggagatcggaatcccggagcggaagcgcttggtgaagtcgtcgcgctccatcatgcgcgccacggtgtacttggccgccagctggatcatgccgcgcgcgcccagcggatcgcaccactcgctgttgtagcggatctcggtgcgggccgggtccagcaccaggctggcctggcggtagtaggtctgggcgttggcctcgatctgctcgcgcgtgagcggcgggcgcgtgctgttgcggcccgacggatcgccgatggtcgaggtgaagtcgccgatcaggaagatcacctggtggccgaggtcctgcagctggcgcagcttgttcagcaccacggtatggccgatatggatgtcgggcgcggtcggatccaggcccagcttgatgcgcagcggcacgccggtggcctcgctgcgcgccagcttctgcgcccattcggattcgatcagcagttcgtcgcagcctcgcttggagacttccagggcctgcatcaccgacggcgtcagggggtatttggccgtggggcccgtggcaacttcagtcatgacgtaagtctttgaaatacttgaaattttaggaaatttcctgacagccgccagggccggattttggtataatccgcgattcccggcgcctacggaagcctttccagtgcgccacccgccactttatgcagcagtgcaggcggccaaataacagtgaagagcccgcgccgcacctcgggggaggaaggcagacgagacacatcgtccccggcagcggtgctcagaccaaggttgaattttacgtgatgtggtccagactccgcgaagttttcgcgcgtgagctggtggttcttgtcgatccgaccaacccccagcacgcgcggcggcgcaaacaactgacggcctcggtgggcgcaatcttcacgctcggcatggccgcggcgatgggcgttgcgccgcgcagcgcctttgacgatccgctcgcaccgcgcacgcagcaggcgctgcgcatgcccgacgtgcgcgagcaacttgaacagcttaccgacagccaggccgtctacgtgcgcgaagaacgcatgcagcgcggcgacaccatcgccagcctgctcaagcggctgggcgtggacgatgccgacgcgcaggcgttcatcgtcaagaacccgaccgcgcgcggcctgttcaacctgaaccccggccaggcggtgcaggcggagatcgacgaaagcaacacgctggtgtcgctgcaggccaacctgggcggcgacgcagccgcctcgcgcgagctggtgatcgaacgcgtgcgcgcggccagcgacaacaccgccgccacctacaaggccaaggtgcagcgcgtcgacaatgacgtgcactatgagatggcctcgggcgcgatttccgcgggcggtttcttcaaggccatggacgcggccaacgtgcccgacgaagtcgtgcagcagatgctgtcgatcttctccggcgtgatcgacttccaccacgacatcgccagcggcgaccgcttccgcatcatctacgaagcgggcttccgcgacggcaccttcgtgcgcaacggccgcgtggtcgcactggagctgatcaaccgcaaccagctgcaccaggcgctgtggttcgcgcccgaagacagcaaggacggcggcgcctactacaccttcgacgggcgcagcatgaagcggccgttcctgcgttcgccggtggaattctcgcgcgtgtcgtcgggcttcggcggccgcgagcatccgctgcatcatgactgggcgcagcacaagggcgtggacttcgccgccccgaccggcaccaaggtgctggccaccggcgacggcgtggtcgagttcgtgggccagcagaacggctacggcaatatcgtcatcctgaaccacgccaacggctactcgacctactacgcgcacctgtccggctttgccggcatgcgccagggccagccggtgcgccagggccagctgatcggctatgtcggctcgaccggctgggccaccggcccgcacctgcactatgagttccgcttcaacgacgtgccgcagaacccgctgaccatcacgctgatggaatcgccgacgctgaccggcaagtcgcgccaggaattcctgacctacaccagcgggctgctcagccgcatcaatgcgctgcgcacctacaacgtgctgaccgcctccaactgaccgcgcccatcgtgacccagcccgtgcctggcagcgaacgctatatcggcatcatgtccggcaccagcatggacggtgccgacgcagtgctggtggatttcagcggcgcgcggcccgccgtgctggcggccgccagccagcctttccccgacacgctgcgcgcggcattctctgccctgcagcagccgggcgaggacgagatccatcgcgaggcgctggcagccaatgcactggcgcaggtctacgccgactgcgtggcggcactgctgagcgaggcccaggtcgacgcggccgcggtggccgccatcggcgcccacggccagactatccgccaccggccgggcctgtacgacggcatcggctacacccgccaaagccagcatccggcgcatctggccgagctcgccggcatcgacgtggtggcggacttccgcagccgcgacctcgccgccggtggccagggcgcgccgctggtgccggcgctgcaccatgcgctgttcggcagcgacgccgaaacccgcgttgcctgcaatatcggcggcatctccaatatcagcatcctgcccgcggcgggcggcgccgtcagcggctttgactgcggcccgggcaatgcgctgctcgactactgggtcggccgccaccgcgggcttcccttcgacagcaacggcgactgggccgccagcgggcgggtcgacgccgcgctgctggcgcagtgcctggccgagccctacttcagcgcagcaccgcccaagagcaccgggcgcgacctgttccatccgggctggctcgaagcccgtctcgcctcgttccaacacctcgcgcctgccgatgtgcaggcgacactggccgcgctgactgccgaggccatcgcgcgcgacatgcgcacccatgcgcctgatgcgcgccgcctgatcgtctgcggcggcggcgcccgcaatgcgttcgtgatggcacgactgacgcaggcattgcccggcgtggccatcgagacctcggatgactacggcgtgccggtgtcgcaggtcgaagccatcgcctttgcctggctggcacgccagtgcctgctgcgcctgcccggcaacgtgcccaccgtgaccggcgccgccgggccgcgcgtgctgggcgcgatctatccgcgctaaggcaggcgcatcgcgccgcccgcctccacccaatccatgaacgcttgtgccagcggcgaggcccgcatggccggcgagcgcgccagcaccacgcgctgcggcgtcaccggctcgcgcagcggcaggcaggcgatcggcacgccgtcgtagctgtggtcgccggccgggcgcgtgcacgacagcgccacgccatagccgtgcgccaccagtccgcgctgcatctcgaaggtctgcgtgtactggtgcagcaccgggtgcaggccatgcgcccagaacagcgacaggaagtactcgcgcgtctgcgggatgtcctcgaggatcagccgttcgccggccaggtcggccaggctcacatcggtgccgcttgccagcggatggccggcgggcagcagcgcatagggtgccagttccgccagcgtgcggcgctcggtgcgggcatcgagccccagttcataggtcagcgccagttcggccttgcccgcctgcagcgtgcggtggacggtcgccaggtcggcctcgaacaaggtcaccgagatgcccggatggtgccggcgcagccccgccagcagacgtggcacaaagtacggcccgaggtcctggaagcaggtcagcgagagctggccggtcaacccccggccggtggcgtcgtccacggtgaggccggccgccagcgcaaggatgtctcgtgcccgccccagcaggcgctgaccggcgggcgtcagcgacaacccacggctgacctggcgcctgaagagaggctcgcccagagtgtcttccagctgcgcgatcgcggtggagacagacggctgcgacacatggcgcgcgcgagccgccgcgctgatgctgccgtgctcggctgcggcgacaaagtattcgagctggcggaaagagaaggggatcatgatttcctatatcgcaacataggaaatatatgcttttcctatccccaatgcatggcgatactgggcacatcgcccccacacaatatcgccatgaacatcacccaggaacacatcgacacctaccagcgcgacggcgtgctggtgctgcgcggcgctttcaccgactgggtcgaacggctgcgcgacggctttgcgcagaacctggccgagccgggcgccttcgccatcgagaacgtacggcccggcgaaagcgggcgcttcttcgaggactactgcaactggcagcgcattacgccgttcgatgactttatccgccagtcgccggcggctgccattgccgggcgcatcatgcagtcgcaggcggtgcaggtgttccacgaacacatcctggtcaaggagcccggcacggccaagcccacgccgtggcaccaggacctgccctactactgtgtcgacggcacccagaccgcgagctactggatcccgctggacccggtgacgcaggccaataccctgcgcgtggtggccggctcgcaccgctgggcgcggctggtgcggcccaagcgctgggccagcaacgagaacttctatggaggtaacgacgccttcatggagatgccggacgtggaagacggcagctacaccctgctcgcaccggaactggagccaggcgatgccgtggtgttcgacttccgtaccgtgcatggcgctgccggcaataccggcagcgggcgccggcgagcgttctcggcgcgcttcctgggcgacgacgtgcgcttcatgctgcggcccgggcgcacctcaccgccctttcccggcatcgatcagcagaccggcgagcgcatgcgcgaagactggtttcccgtggtctggcgcgccgcgcggtaagccatcgcggaaaagaaaaaacgcacccgaaggtgcgtttttttctgggccggtgccggtcagaccgagaacgacgagccgcaaccgcaggtggtcgaggcattcgggttcttgatcacgaactgcgcgccgttgatgtcttccttgtagtcgatctcggcgccgaccaggtactggtagctcatcgagtcgatcagcagggtgacgccgttcttgaccatggtggtgtcgtcttcgttgacttcctcatcgaaggtgaagccatactggaagccggagcagccgccgccctgcacgaacacgcgcagtttcagttcggcattgccctcttcctcgatcaactgcttgaccttgtcggcggcgctgtcggtaaagacgaacggtgccggcacgtcctcggtaacgggtgcctctgcgactgcgttcatggggggttctcctgtttagatacgcctgtattctaagcgctactgaaagatcgtgccgaaaccctgtgttttcaaggggttcccggcatggcgggtgccgctcaggcggccttttcagtgggttgggtgtcggcagcgggcgttgcgcggtccgtgacagcagcctcgtccgccgcttccgtcacttcgaccgccggcgccgcctcgaccaggttcggcagcgccttgatctcgccttgcaccagcggcatcaggcggccttcgaccagcgcgccctggtgcatttccagcgccgcatagcgcacgtcgcccagcacgcgggcatgcggctgcagttcgagcaggtcggtggcctgcaccgggcccttgacggtgccgttgagcaccaggtggccaacgctgatctcgccctcgatcatgcctttttcgctgaccaccagcatgctcggcttgcccggcgccgcggtgacgttgccgcgcacgcggccgtccaggcgcaggccgcccgcaaataccaggtcgccgtcgacggcggtgtcttcgccgatcagagtatcgatcgaaaggcccttctttttcgaaaacagcatcactctcactcctctctcgttcgtgccgaaccctccggccgtggcgcattcgcgccggcaagcagcacttgccgatggcgacagggcgtgattgtagccgcgcgcagcccataccccacaaaagtatggctgcccaatcgctttttcggcaggccagagtatttccgtaccctgcaggcgaaaaaaaaccgcacggccagcgtgcggtttctttggtctcgcaagatccggcagtaccggacctgcgaaaacgcatcagcgcttcgagaactgcttgcgacgacgcgccttgtggaagccgaccttcttacgctcgacttcacgtgcatcgcgcgtgacgtagccagccttcgacagggccgacttcagggtcgcatcgtagtcgatcagggcgcgggtgatgccgtggcgcactgcgccggcctggccggtttcgccaccgccggtcacgttgaccttgatgtcgaacgtttcagcgtgagcggtcagttccaggggctggcgcacgatcatcagcgaggtttcgcgagcgaaatactctttgatgggcttgccgttgacgatgatatcgcccttgcccgacttgatgaagacacgagccacagcgctcttgcggcggccagtaccgtaattccagttaccgatcatggattggcctccttagatttccagcgccttgggctgctgcgcttcatgcggatgctcggcttcggcgtaaaccttcagcttcttgatcatcgcgtagcccagcggacccttcggcagcatgcccttgacagccttttccagggcacggcccgggaaacgctgctgcatcttgccgaacgtcgtttcgtagataccgcccgggtagcccgaatggcgatagtacttcttgtccgtttccttggtacccgtgacacgcagcttggctgcattgacgatgatgatgtaatcacccgtgtcgacgtgcggagtgaattccggcttgtgcttgccgcgcagacggcgtgccacttcgctggcgacacggccgaggactttgtccgtcgcgtcaatcacgtaccagtcgcgctttacctcatgaggcttggcggaaaaggtcttcatgatttttcctgactattagttcgtacccgaaatccgactcgcgaaggcttgtactcgcccctgcaagtcttgtggctggcccgtgagggctggcctgatcctgctctttcttccgcgggtatgacggaaagccttccattatactggcggctaccggaaccgcacaagcaaagactgaccttttcgtcaaggtcgccgccatcgcgggcccaaaccagggcagcgtcgcgcgcttttcagtgcttagcgcgccagaacgcaggggcgaaaaaaaacccaagcggttgagcttgggtttgaatccaccaaaggaggagggtggaggagacactgggagatcgacggagggactggcgggcggtgcggcttgccctggggcttcgctttcgcactctggcgcgctgtcagtgccgtcgttcaatgattcaaattatacatggggttttccccagtgcaaggaaaatttgtactgcgaaattcaatttcgtattgcggaaagaaaaacgtgacgcaccagacagagcatttcgcttagaaatcaatgacttacgaaaaatcaaggcatgtcattgagctgtcatactagaggaaaccctcagatttcatagggatttgggcgtcagcaacccaagctgggcgatgccatatactgagaattgcaagattcgagatcatgcgcctgtgatcggaagcacacaatataaacgacaggaacgaacaaaatggaatgcaaagtgacatggatgggtgccgacggcatgagcttcgtggcccagaccggcagcggccatatcgtggcgatggacggtgcgcccgacggcggcggccataacctggcaccgcggccgatggagatggtgctgctcggcaccggcggctgcaccgcctatgacgtggtgctgatcctcaagcgcggccgccaggacgtttccggctgcagcgtgcagctgcaggccgagcgcgccggcgaggaccccaaagtcttcacccgcatcaacttccattttgtggtgaccggcaagaatctcaaccccgccacggtcgagcgtgccatcaagctgtcgcacgaaaagtactgctcggcgtcgatcatgctggccaagacggccgagatcacgcacacgatggaaatcgtcgaagcctgaaaggaagatgcagacccggtacgccgtggtggcgccgggtcatgccggaagaagaagcaaagcaggccgataagccggattctgtgcgccccgcccgccttgcggcaaacggtgcgtgacaaccattcctctaggccggctgttaccagccggctccagctccctacccgcagactcagcgggccgcttcatcgcctgcctatttgggattgctccaggtggaggttaccgcgtttcacccttcccgccgggcgaacccggcggcaagactcgtctctgtggccctattccgcacgttgccgtggatggctgttagccaacaccctgccctgtggagtccggactttcctccccctgcaccttgcggtgcaggcagcggttgcctggcctgctttgcggcccgcagtctaacaccgattggcggcgccttcagtcggcgcgccgtcctgggcggaacacagaggtatcggcgtagaagccaggttcggcgttatcgtcgcaccagcccggaatacccatcaccggcagcggcgcaaaactgcgcccgccgcgcagcgcgccagcctgggccgcagcggcaagggattgcgccagcatgacgtccagccacgggcctgccgcctgctgcggcgccagcggcagcacccatgcatgggcagtgaccgacttgtacggctgcaccagtttttcgagtagcgcatggccgaacggcaccaccgtgcaggccctgccccacgccggcctggattcgaccagcagccgctgccacgcaaaccccttgagcgcatccgccaggtcctggtcggtgctgacaaacagcaccgcattttcgtcgaacagggtcgccgcatcgcgcacgctgccgcgcgtggtctgcacgccttcgcgcgcaatgacctcggcctggatctggttgagcacgcgcttggcttgcgggaaatgcagccaggtcagcgcgttgaagaaatcgtggagattgtcgcgggtcgggatctcgccggtggcatggatatgcgcctcataggcgctgccttccggcaaggcatgctgggcaatgaaacgcagcggcaggccgcgggcattgcacaggcggagttgggctgcatgcgcacttagcagcgcgcgcagatcggcgccgccctgcaccgccgcagcgagcgcggcaccctgcgcagcaaacagctggaaccacggccgggaccagtcgatcccggccagcgcggcgacgaagggctcgtcgcccgcttgcgcctgcatgggcaaggccgcagcagggtttagcgggccttccagcgcagcgtctcgccgccgcgcagcggcaccagcgtggtgtcgccatagggcagctcggccggcagttcccagtcctcgcgctccagcgtcagcgtgccggtgttgcgcggcaggccgtagaaggccgggccgttgaagctggcaaaggcttccagcttgtccagcgcgccggcggcgtcgaaggcctcggcatacagctccatcgcatgcagcgcggtatagcagccggcgcagccgcaggcgtgctccttcagcccgcgcgcgtgcggcgcgctgtcggtgcccaggaaaaagcgcgggctgcccgagaccgcggccgccaccagggcctcgcgatgggtctcgcgcttgagcaccggcaggcagtagtagtgcgggcggatgccgccggtgaagatggcgttgcggttgtagagcaggtggtgcgcggtgatggtggcgccgaccgggccgctggcgtcgcgcacgtattcggccgcatccttggtggtgatgtgctcgaacaccaccttcagctcgggcatgtcgcggcgcagcggcgtcatcacgcggtcgataaagacggcttcgcgatcgaagatgtcgatgctggggtcggtcacctcgccatgcaccagcagcggcaggcccgcgcgctgcatcgcttccagcgccgggtagcagcggcggatatcggtcacgccggcgtcgctgttggtggtggcgccggccgggtacagcttgacgccgtgcacgaagccgctggccttggccgcggcgatctcttcggccgtggtgttgtcggtcaggtacagcgtcatcagcggctcgaactgcaggccggccggcagcgccgccaggatgcgggcacggtaggcctgcgcctgcgccaccgtggtcacgggcggcttcaggttgggcatgatgatggcgcgtgcgaactggcgcgcggtgtcgggcagcacggcggccagggccgcgccgtcgcgcaggtgcaggtgccagtcgtccgggcgggtgatggtgagcttctgggtcatggctagcttgggcctgccgcggcggcggctggcgttcgtcgaaatcagagaatcaggatggcgcggtagtcgttcacattggtgcgcgtcgggccggtgactaccaggtcgccgatggcatcgaacaggccccaggcgtcgtgcgcgtccagctggcgcagtcccggcaggccggcggccgcggcgcgcgccagcgtggtcggatcggccagcgcaccggcattgtcttccgaaccgtcgatgccgtcggtgtcggctgcgatcgcatgcacgccgggcatgccgtcaagctcgaccgccagcgacagcaggaattcggagcaacgcccgccccgtgccttcgtggcgccaccgccggcaggcaaagtgaccgtgcactcacctccggaaatcagcgccacgggcgcggcaaacggcgcattgtacgcgcgaatctcgcgcaccagcgcggcgtagacgcgggccacttcgcgcgcttcgccggtcacggtatcgcccagcaccaccggggtgatgccgcgttcgcggaacagcgccgcggccgcctgcaggctgccatgggcagtggcgatcatgcggtggtcgacccgggcgaacagtgcatcgcccggcttgggcgtctccggcacgtcgccgcgggcgccgcactccaggtgtgcctgcacgctggccggcacctgcgcgccccagcggcgcaggatctccagcgcatcggcaaaggtgctcgggtcggccacggtcgggcccgaggcgatcgcactgggatcgtcgccggccacgtccgagacgatcagcgtggtcaccggcgcacggcttgcctgcgccagccgcccgccctggatgcgcgagacatgcttgcgcacgatattcatctcggtgatcggcgcgccacagcgcagcagttcccgagtggcggccttcaggtcagccatcgggatgccttcggccggcagcgacagcaggctggagccgccgcctgacaccagcaccagcagccggtcctgcggcgtcagcgactgcacgctggccaggatatcggcggcggcctgctcgccggcctcgtcgggcaccggatggccggcctcgatcacgcggatatggtcggtcggcagcccgtgggcgtagcgcgtgaccaccagcccctccagcgtggccttgccagcgtaggcacgctcgaccgccgcggccatcgacgccgcggccttgcccgcgcccaccaccagcgtgcggccgcccgcgtgcgggggtggcaggtgctgcgccacgatctgcagcggatcggccgccgccaccgccgcgtggaagctgtccagcagcaaggcgcggggatcgcccgcgaccgccgcgctcacagcgcctccgcgatagccaggcccaggtcggcagtgccggccttgccgccgatgtcgcgcgtcagcggcgcgtgttcggggcccgcggccagcaccttttcgatcgcgcccagtacggcggcgccggctgcttcatggcccaggtgctccagcatcatggcgccgcaccagatctggccgatcgggttggccacgccgcgcccggcaatatccggggccgagccgtgcaccggctcgaacaggctgggaaaggtgcggtcggggttgatattgcccgacggcgcgatgccgatggtgccggtgcaagccgggcccaggtcggacaggatgtcgccgaacaggttgctggccaccacaacgtcgaaccagtccggatgctggacgaaatgcgcggtcaggatgtcgatgtggtacttgtcgaccttgatgccggggtagctggccgccatcgcctcgacgcgctcgtcccagtacggcatggtgatcgagatgccattggacttggtcgccgacgtcaggtgcttcttcggccgcttctgtgccaactcgaaggcaaacttcaggatgcggtcgacgccggtgcggctcatcacggtttcctgcaccacgatctcgcgctcggtgcccgggaacatgcgcccgccgatgctggagtattcaccctcggtgttctcgcgcaccacataaaagtcgatatcgccaggctggcggccggccagcgggctcctgatgccgggcatcagccgcaccgggcgcaggttcacgtactggtcgaacgagcgccggaactgcagcagcgaaccccacagcgagacgtggtcaggcacggcatcaggccagcccaccgcgccgaagtagatggcgtcgtacttgaccagcgtgtcgaaccagtcgtccggcagcatcttgccgtggcgggcgtagtagtcgcagctggaaaagtcgaagtggtcccactggaagtcgatgccgaagcgccgcgccgcggcgtccatcacgcggatgccctcgggcatgacttccgtgccgattccgtctccgggaatcacggcgatcttgtattggcgcatggttattggggagatacgtgcaggatggccggtcgccgcgcgcggccggccgacgctgcttggcagcggcccgggtgcgcgggataatgtctgcattctattgcaaagcggcagcccactgccgaccggtgccccgatatgtgccagctgctaggcatgaactgcgccacgccgaccgacgtgacgttctccttcaccggctttgccgcgcgtggtggcctgaccgaccatcacgccgacggcttcggtgtggccttcttcgaggacaaggcctgccgcctgtttatcgacaaccagtcagccggcacctcgccggtggcagacctgatcaagcgctacccgatcaagtccaagaacgtcatctcgcatatccgcaaggccacgcagggcaccgtgctgctggagaactgccaccccttcatgcgcgagctgtggggccgccactggatctttgcccataacggcgacctgaagggcttcaccccgttcctgtccggcgtctaccagccagtgggcgataccgacagcgaactggccttctgcacgctgatgcagggcctgcgcaagcgcttcccgggttcgcagccgccgctgaacgagctgtgccatgcgctggccgacatcacccgcgagatcacgctgcatggcgtgttcaactacctgctgtgcaacggccaggcccagttcgcgcactgctccacgcacctgtactacatcgtgcggcagtggccgttctcgaccgcgcacctgatcgacgccgacctgtcgatcgacttcgcccaggtcaccacaccggacgaccgcgtggcggtgatcgccacccagccgctgaccgacaacgagacctggacccgcttcgccccgggcgagctgatcatgttcgaggacgggcacccgaccatgacgctgacggtgccgatcccgcctgaagtgcaggcgaagaacgcggccaacacggcctgcacctgagccatcgggaacgaaaaaagggacgccgaggcgtccctttctgcttgccctgccaggccggtcaatgatgcaggatcttcgacaggaactgcctggcgcgctcggagcggtgttcgatattgccgaagaactcctccttctcgcagtcctcgacgatcttgccctggtccatgaagatcacgcggttggccaccttgcgcgcgaagcccatttcgtgggtcacgcacatcatggtcatgccttcctgcgccagctgcaccatcacgtccagcacttcgttgaccatctccgggtccagcgccgaagtcggctcgtcgaacagcatgcagatcgggtccatcgacagcgcacgggcgatcgccacgcgctgctgctggccgcccgacagctggccggggtacttctccgcctggctcttcaggcccacgcggtccaggtacttcaggcccttggccatcgcctcgtccttggagcggccgagcaccttcatctgcgcgatggtcaggttctcggtgatcgacaggtgcgggaacagctcgaagttctggaacaccatgcccacgcgcgagcgcagcttgggcaggttggtcttgggattgcccaccgaggtgccgtcgaccaggatatcgcccttctggaacggctcaagcgcgttgacggtcttgatcagcgtggactttcccgacccggacgggccgcataccaccaccacttcacccttggcgaccttggtggtgcagtcggtcagcacctggaaggcgccgtaccacttggagacattgttgatttcgatcatacagccacctttttctggtaacgcttgaccagcagcgaagcggagaagcagataacgaagtacaccacgccggcgaacagcagcatctcgacgatgcggccgtcacgttcgccgatgccgtaggcctggccgaagaagtcggccagcgcgctgacgtagaccagcgacgtatcctggaacaggatgatgccctgggtcagcagcagcggcaccatgttgcggaacgcctgcggcaggatcaccagccgcatcgactggccataggtcatgcccagcgcctgcgccgcgaacatctgcccgcgcgacacgctctggatgcccgcgcggatgatttccgagtagtacgcggcctcgaacagcgcaaaggccaccagcgcggacgtcatgcgcaggtcggtcgccggcgacaggttgaacaggttctgcagcacctgcggaatgatcaggaagaaccacaacagcaccatcaccagcgggatggagcggaagatggtcacgtacccctgcgcaaaccagttcagcagcctgaacgacgacagccgcatcatcgccaggatggtgccccagacgatgcccaccaccaccgcggtgacggtgatcttgagcgagaccatcatgccctcgcccaggacctcgagcgtggcaggggtgatggaagtgaaatcgaaggaataagccatggcgcccccttacttgccgccgataaagccgggcacgcgcgtgcgggcttccacccagcgcatgatcagcatcaccgtcacgttgatcagcgcgtacatcagcgtgaccgcgatgaacgattcatacgggcgcgcggtgtagtccaccagttgccggccctgcgccgccagttccagcaggccgatggtcgaagccaccgccgaattcttgaagatgttcaggaattcggaagtcagcggcggcacgatcacgcggaacgccatcggcagcagcacgtggcggtacgtctgcggcagcgtgaagcccatcgccaggccggcattcttctgcccgcgcgccagcgagttgatgcccgagcgcacctgctcgcagacccgcgcggcggtgaaggtgcccaggcacagcatggcggccaggaactgctgcgcgaacgggttcatctgcttgatcgcctcgccaccgggcagcagctcgggcgcgacgaaataccagatgaacagctgcaccagcagcgggatgttgcggaagatttccacataggtggcggcgatgcccgccagccacttgttgggcacggtgcgcagcacgccgagcaccgaaccgatgaccagggcgatgacccaggacgagagtcccagggcgagcgttaccttcaggcccgagatcatccagtccaggtaggtctcgttctgggcggcctgttcgaggaaaactgcccaatgccagttgtagttcatgttgcgtcctcaaaaagaaacggaaggacatgccttccgtttcacactgctgtcaacggcaggtcagtccagcgccttgtcgttcggcgtcttgaacaacgccttcatgtcttcggacagcgggaagtccaggttgaggcccttcggcggcaccggcgtcatgaaccacttggtgtacagggtgttgatcgaaccgtccttcatcatgccggagatcacggtatcggacagcttcttgaactgcggatcgtccttgcggatcatacagccataggactcgcgcgattgcggcttgcccaccacgatccagtcggccgggttcttggccttggcgcgctcgccgtacagcagcgcgtcgtccatcatgaacgcgaccgcgcggcccgattccagcgtcaggaacgactggccatggtccttggtgctgatgatgttcacgcccagcttctggtcgtcgttcatcttgcgcagcaggcgctccgacgtggtgccggcggtggtgacgacgttcttgcccttcaggtcggcccagtccttgatgccggcgtccttcttcaccatgatgcgcgtgccgatgatgaagatggagttggtgaacccaacctgcttctggcgctccaggttgttggtggtggagccgcactcgatgtcgatggtgccgttctgcagcagcgtgatgcggttctgcgaggtgatcgggatttccttgacctgcaggttcggcagcttgagctggtccttgatggcttccacgatcttcatgttgatatcgtaggaatagccgacctgacgcacgccgcccaggttgtaattgaacggaatcgacgactcgcgcacgcccagcgtgatgacgccggtgtccttgatcttcttcagcgtgcccgtcagttgttcagctgcctgtgccgtcccgcacatcacgcccccggcaatcatcagggcagccagcttggcgaaattcataacatctccttgaccatgaagagaaagcgggattctagagataaaacccccactggtgaaacagtattgcgcagcatccgccgcaatacaactgggttttctcctagaaccccacttcagggcaatcactgcgcacggcgtccggatacgacaacgcggtctccggcgcttgccggagaccgcgtctgacggtcatgagccatggggagcgtgacgattattgcattgcaccatggcagtgccttatcccgtttcccgtgcccggatcagggatacaggccgcgcatctcgcgcgcctgcaggatccgcgtacaggccacgataaacgccgccgtgcgcagcgtcaccttgttgtcctgtgccacttgccagattgcccggaaggcttcttgcatgatccgtaccaggcgctggttgatttcttcctcggtccagaaaaagctggagaaatcctgcacccattcgaagtaggacacggtcacgccgccggcgttggcgatcacgtcgggacagaccaggatattgcgctcgcgcaggatatcgtcggcttgcggcgtggtcgggccgttggcgccttcaatcaccagctttgccgtgatcttgggcgcgttctgcaccgtgatctggccttccagcgcggccgggatcaggatgtcgcagtcgacttcccagaactgctcggtgcgcaggacttcgccgcggaagccttcgatggtgccgctgtgcgaggcgtattccatcatcgccggcacgtccaggccggccgggtcgaacagcgtggtgcggtggtcctgcaccgccaccaccttggcgccggcctcatggaacagcttggccgccaccgcgcccacgttgccgaagccctgcaccgccacgcgcgcgcccttgatctccaggccgatattgcgcgcggcctcggagccgaccacgaacacgccgcggccggtggcttcgtggcggccgagcgagccgcccagcgagatcggcttgccggtcaccacgccggtggccgtgctgccggagttcatcgagtacgtgtccatcatccaggccatgacctgggcgttggtgttcacgtccggcgccggaatatccttgctcggcccgatgatgatgttgatttcgctggtgtagcggcgcgtcaggcgttccagctcggcgtgcgagagcgtgcgcggatcgacgcggatgccgcccttggcaccgccgtagggcacgttgaccgcggcattcttcaccgacatccaggccgacagcgccatcacctcggacagggtcacgtcctggtggaagcgcacgccgcccttgcccgggccgcgcgacaggttgtgctgcacccgatagccctcgaaatgggcaatggtgccgttatccagttcgatgggaacgtcgacgatcatcgcgcgcttggggcgcttgagggtttcgacccagcgtgccagcgagcccaggtaaggcgtgacacggtcgacctgctgcaggtagatgccccaggggccgagatggtcggcattgaggtaagacgggagtgcgtgcttttggccagcaatattggtcggtgctgcggaagacatcggttggttccggtgtgaagaatgcccgcaagcttagggctggcgccccgcccgaatccaatgccgtttgctcatccggtcatgcaaaacctgcataacgttgtcatctggcggaaaccggggagccggccggctgggcggactgggccgccgacaaggtcgaccacacctggtcgaccagctggcgcttgcgccgtgccccggcgcggcgttcgttgccgttctcgcccgggcgctcgcggtacaggcggatttccatgtcgatcgacaacggcagcccgcgcgccgactcggcccgcaccagccggcccgcggccacgtcctcgcgcaccgcgctttcgggcaggaaggccatgccgtggccggccagcgccatcaccttgagcgcctcggccatgtcggtctcgtagcatttgtcgagcttgagcgcctcggaggtgtcggccagcagcaggtcgaccatgcggccgaggaaggcgttgggcgtgtagctgaggaagggcactggcttcttgtcggtgccgggcagccggaattgcggcttgccggcagcgtccggcacgctgtagggcgacagccgctcggtaccaagtaccagcatgtcgtaccgggccggatccagctggatcgcctggcgcgcgtggtggtagaccatcaccaggtcgcagccgccctccaccagcatcagcaccgcgtcgtggacgttgagcgcgcgcagccggcacggcagcgtgccgatcctgcgctccagcgccttgagccattccgggaagaaggtcagcgacagcgtatgcggcaccgcgaactccagcacctgggcgttggccgagcgctggccgcgcatcagcgcacgggtctcgctgacctgcgccagcatggccagcgcctgctcgtagaacaccttgccggccggggtcaggctggtggggtagctcgagcggtcgatcagctcggtgccgacccacgcctccagcgactggatgcggcgcgagaacgccggctgcgtgacgtggcgcagctcggccgagcgcgagaagctgtgcgtctcggccaggctgacgaagtcttcaagccatttgatttccatgacgcggattatccacccgcgcccgggcctccgtcacctgtccggcggcaagccgtcagccacgatgcgcccagccggtcatgcgcttctcgaccaccgcaaacagctcgtacatcgccatcgccatcaccgcgatcaccaccagcccggcaaaggccagcggcatcttcatggccgagccggccgacaccagcaggtagccgatgccctcgttggcggcgttcatctccgacaccgtggtgccgacaaaggccagcgtgattgccaccttcagcgaggcgaagaaatacggcatggcgcgcggcagaccgaccttgaacaacacgtcgcgccgtttggcgccgagcacgcgcagcacgtcctccagttccggctccagcgtggccagcccggtggcgatattgaccatgatcgggaagaacgagatcaggaacgcggtcaggatggccggacccgcgcccaggccgaaccacaccaccaggatcggcacgaaggcggccttgggcagcgcgttgaaggccgtcatcagcggatagctggcggcatagagcagccgtgacgagcccattgccagccccagcagcacgcccacggcgatggccacgccgaagcccaccatggtggtccagaaggtgcgccacgcatggccggcgatcacgtcggcatattccaccagcgaggccacgatcgccgatggtgtcggcaggataaagtcggacacgccgaaggccatgcacgcgccctgccacagcagcagcaccgcggccagcagcagccagggcgccacgcgctgcacgcggcgctcctgcgcggaagtgagagtcatcatggtagctttgcctcagtgttggcgcacatggccgatcttctcgcgcagcatgtgcaccaggtcggcaaatggctcggtataggtcagttccaggtcgcgcgggcgcggcaggtcgatctccttgcgcatcaggatgcggcccgggcgctggctcatcacgtagacggtgtcggccaggaacacggcctcgcgcaggtcgtgcgtgaccaggatcacgttgaagcgctgcgcctgccacaggtcgcgcagcacgcaccagagctcctcgcgcgtaaaggcgtcgagcgcgccgaagggctcgtccagcagcagcatgcgcggctcgtggaccagcgcgcggcagatcgaggcgcgctgctgcatgccgccggacagctgccacgggtacttgtcctcgtagccggccaggcccaccgtatgcagcagcttgcgcgagcgctcgacgtactcgtcgcgacgtgcgcgcagggtggagcgatatggttcgacgatctccagcggcagcatcacgttgtccagcgtggtgcgccacggcagcagcgtgggcgcctggaaggccatgccgacctgcttgagcgggccggtcaccttctcgccggcaatcctcacgacgccgcgcgtggccgccttgagcccggtcgccagcttcatgaaggtggacttgccgcagccggacgggccgacgatggcaatgaactcgcccggcgccacctgcagcgagatgtcctcgaccgcgaactcgcccttgtgcgcgagctcgtcgttataggccagccagacccggttgaaatcgacaaagggttccgcggccgcgggcgcggcgctcccgccggaggcgggcatgaaggcagcctggcgcgtcatcatcgcagcacatccagttcggccgcgctgggcaggaacgcgtcggtccacagggcatcggggttgatgcggcccttggtgccgaaggcatcggccacctgcgaggccatcagcgacaggcgcggctcgctgacgcgcccgaagccctcggccttcgcgtccggcgacttgaccacgctgtccagcgccagcttgagccggcgcacttccagcttctcatcgatgatgccgtcgcgcgccttgaccgccttgatgccctcttccggccgcgcgatcacgtcgcgcgccgacttgctgaaggcgcgcaggaaggccttcaccgcctcggggttcttcttcatgaaatcctcggaggcgatcaccgcgttgccgtacagcttcacgccgaactgcgggtacggcagcaccacgatgtcttcatccttcacgccgcgcgcgttcaggttcaggatcgatgtgaacgagaacccggtgatggcatcgaggtcgccgcgcgtgagcatggtctcgcgcagcgtcgggtccattgcctgccagttgaacgaggacgcctgcaggccgttggccctggcgaagatcgggaaggcgcggcggccggcgtcgaacaccggagcacccatgcgcttgccggcgaggtccttcggcgcgcggatgccggacttcttcagcgcgaggacggcggcgggcgtgttgttgtagaccatcatcacggccaccggcttgttcttcgcgtcggggttgttgccgtagaactccatcaccgacgacatatcggcgaagcccatgtcgtacgtgcccgaggccacgcggttgaccacgttgcccgagccgttgccggcatcgatcgagacgtcgagcttctcggccttgtagtagcccttctgctcgcccagcaggaacagcgccgccggcccttcgaagcgccagtcgagctggaagcggaccttggttggtgcagcctgcgcgtgggccgcgccggcgaactgtgtcgacagcaccaggctggtgccgatcatcacgccgagcttcagcaggcggcgccgtgccgcagtgcgggacgcgcgcgtgccggtatgttcatggttctcggcggcagcagcgcaaacgccgggggacgctagcgcagcgtggaaatgaggcattgaatctctccgttgatcgtgatctcggagggattcgtccgcaagggacgtgccaggtttttcagccccgtttcagggcgtgcccgcaagcgattgccgaaccaaaagtgtgcgaggcgattgccgcagcgccatcgtcggcaatgattgtcgacaatgcccgccgccccttggtgcacgcggatacaggagaatgcagtcccgtcaggcgtcctgcgtggcgtcgcccacgtcgagtgccagcgcatccgcgcccacggcttcgccgcccttggcggcggcgcgcgcctggatgtcccacatctcggcgtagcggccacgcgcgcgcatcagctcggcatgggtgccgcgctcgacgatgcggccgtggtccatcaccaggatctggtcggcatgcacgacggtggacagccggtgcgcgatcagcagcgtggtgcggttctgcgccagccgcatcagctcggcctggatcgcctgctcggtgcgtgaatccagcgccgaggtggcttcgtcgaagaccagcaccggcgggtccttcagcagcgtgcgcgcgatcgccacgcgctgcttctcgccgccggacagcttcaggccacgctcgcccaccggggtgtcgtacccctgcggcagctcgcggatgaagctgtcgatctgcgcggcgcgcgcggcggcgatgacctcgtcgcggctggcgtctggccggccgtaggcgatgttgtagaagatgctgtcgttgaacaacaccgtgtcctgcggcacgatgccgatggcgcggcgcaggctgtcctgcgtgatcgcgcggatgtcctggccgtcgatctcgatggcgccgccgttgacgtcgtagaagcggaacaacagccgcgccagcgtcgacttgcccgagccgctgtgcccgaccaccgcggtggtggtgcccgccgcgatggtgaaatccacgccatccaggatcagccggtccggctcatagctgaagcgcacgtcgcggaaacgcacctgcgcgccgctgacctgcagcggctgcgcgccgggcgcgtcggccacctcctggttggtgcccagcagcacgaacatgcggtccatgtcggtggtggcctgcttgatctcgcggtagatcacgccgaggaagttcagcgggatatagagctggatcatcagggtgttgaccagcaccaggtcgcccagcgtgagcttgccgtcgaccacgcccacggtggcgcgccacaggatcaggatcagccccagtgcgatgatggtctgctggccgaagttcaggaacgacagcgagttctgcgagcggatcgccgcggtgcggtacttgcgcaggttctcgtcgtagcgctgcgcctcgtactcttcattgccgaagtacttgacggtctcgaagttgagcagcgaatcgatcgctttctggttggcgcgcgaatcgagctcgttcatgcggcggcggaaatgcgtgcgccattccgtcaccacgatggtaaagacgatatagcccaccagcgcgcagccggtgatggccgcgaaccagatgtcgtagtgcaggataaagaagccgatcaccagccccatctcgaccagcgtgggcaggatgctgtacagcgagtacgagatcagcgactggatgccgcgcgtgccgcgctcgatgtcgcggctcatgccgccggtctgccggtccaggtggaagcgcagcgacagcgcatgcaggtgtcggaacacctgcagcgcgatctcgcgcacggcgctctgcgtgaccttggaaaagagcatctcccgcaactcggtgaacagtgtcgccgacagccgcagcagcccgtaggcgacgatcagcccgaccggcacggccagcagcgcgcgcggatcgcccggctgcaggttcatgctgtcgatcagctgcttcatcagcaccggcacgcccaggttggccaccttggcggacaccaggcacgccagcgccagcatcacgcgccacttgtagtgccagacatagggcagcaggttgcgcaccgtctgccagtcgctgcggggcgcgcgctgaccgggaaagagcgtgtttgaagcaggagcgggggccggctcggcggtcgtggaatagcggcgcatacgttagaattcgggccaatgcgcgattgtcgcagagttcgcattacgtggcaggcgaagggtctttcgccgcgccccgcctccttccgcagtccaccacacaccgtcatgaacgctccccacaccgtccccgccctgcccgccggcaagaatcccgctctgcgtgtggtgcccatgcccgccgacgccaatgtgcacggcgacgtgttcggtggctggatcatggcgcaggtggatatcgccggctcgatcccggcggtggaacgcgcccagggccgcgtggccaccgtcgcggtcaactccttcctgttcaagcatccggtgttcgttggcgacctggtcagcttttatgcggacatcgtcaagaccggccgtacctcgatcacggtgtcggtcgaggtctacgcgcaacggatgcgccacagcaatgagatcgtcaaggtgacggaggccacgctgacgtatgtggcgacggatgaatcgcggcagccgcggatgctgccgtcggcttgaagggataagccagcgcttgctggctgttttctcccctctcccacgagcgggagaggggagagaacaagcgggattggacagacgtgggccttactcgaacttcgtaaaatccggcttgcgcttctggaagaaggcagcaaacgcctctttcgcctccggcgccaccagcatcctgcggaacaccgcgccctcgtcggccatctgcttttccaccaccgccacatcgcccgccttcatcagccgcttggtctcgcgcagtgacgacgccggcagggccgccagcttgcgcgcctgctccaacgcaaagtcgtgcagctcggccaccggcagcacccgcgtcaccagcccgatctccagcgcctcctgcgcgctgaaggcttcgcccagcagcagcttctcggccgcgcgctggtagccgaccagccgcggcagcagcaggctcgaggcggcctccgggcacaggcccagctgcacgaacggcagcgacaacttggccgtatcggacgcatagaccaggtcgcaatgcagcagcatggtggtgcccaccccgaccgcggcaccgctgacggctgccacgaccggcttggtggcgtggctgatctggtagaggaactggaacaccggcgcctgctccgcgccttcgccggcggtgggcgggcgctgcatgaagtcttccaggtcgttgccggcggtaaagatctcgggcttgccgcgcagcaggatggcgcgcacgttgcggtcggtctcggccgcgcgcagcgcgtcggccatggcctggtacatcgccgcggtgatggcgtttttcttgtcgatgcggtcgaactcgatggtcaggatgccctgctcgatgccggtgcggatgctcatggtgtcctcatctgtggatgcattgctgggtttattcaaaaggcggcggcgattcggaaagatagctcagcccgaacgcgcgcgcgccgacattcagcgccaccgtcaggctcatcggcgccagcatcagtgccacgccctgtccgcgcgcggtgcgctccagcgactggaacgccggcatctcgcgcacgtcatcgagcgggccggcatagcagaccgagatcgccggcaccatcaggtcgccgccgcggatgcactgctcggcatgctgcagcacgcggcgcgcaccctcctcggagccgcgcgccctggcaatggcctcggtgtgcccgcggtgcatgcgcaccaccgggcggatattgaaggcgctgcccatcacatagcgcccccaggtaatgctgccctcgcccttctggcgcgcgcgcgtgtacatgtagagcagctcgtcgggcaccaggaacatatgggcggcatcgcgcaggcgcgtctcgaccgcttcccgcaccgcctgcgggctggcgccggcggcggccatgcgcgcggcttcgcgcacgatcagcgcctggcccggcccgatcgcgccggtgtcgaccacggtcaggtcgaacaggcccgtgcgcccggcttccttgcgcaggcgcacgctgcgcgccacggtgccgatcaccgcgccggtggcatgcgcatacagcttgctgcgcgaactggcaatggtgaagaggatggcgcggtcgcagtgggccaccacgttgcgcagcaggtgttcttccagctcgcgctcgagcagcgggatcgattcggcgtagtggtcctggcggccgatcaggtattgctggtagagcgtgggcagcgcgtcttcatcgcgcgtatcggcgacaaagtgttcgcccgcgcggatgcggaacggaatcgtgtggaccttcagctgggccatgacgtcgcgcggcagatcgcacgcggcatcggccaggatggctgtctcctgcatattattgtctcctccctacctggtgacccgcgtcgcgggcggcagcccccggttactgctttcttcacctgatgcagaagggcgggacagtcccgagggaccgtcccgcaggcgcgttcagacgcgctcgaagatacctgcggcgcccatgcccgtgccaacgcacatggtcaccatgccgtacttcaggttgtgacggcgcagcgcgtgcaccaccgtggccgaacggatcgcaccggtggcaccgagcgggtggcccagcgcaatcgcgccgcccatgcggttgaccttggccggatccagctgcaggtcgcgcatcaccgccagcgactgcgcggcaaaggcctcgttcagttcgatccagtcaagctggtcctgggtcaggcccgcagccttcagcgccgccggaatcgcttccttggggccgatgcccatgatctcgggcggcacgccgcgcaccgcgaacgagacgaagcgcgccagcggcaccaggttgaactgcttgaggatcttttccgagaccaggatcagcgcgccggcgccgtcggaggtctgcgagctgttgccggcggtgacgctgcccttgttggcaaacaccgggcgcagcttgcccaggccttccagcgaggtctccgggcgcgggccttcgtccagcgagatcgtgcgcgacttcacgttcacctggccgctggcgaggtccgggaagcgctcgacgatctcgatcggcgtgatctcgtccttgaactcgccggcctgctgcgccgcgatggccttctggtgcgaggccagcgagaacgcatcctggtcctcgcggctgacctgccattgctgcgccaccttctcggcggtcaggcccatgccgtaggcgatgcccacgttctcgtcgcgggtgaagatctccggcgacatcgacggcgagttgcccatcatcggcaccatgctcatcgattccacgccggcggcgatcatcacgtcggactcgcccacgcggatgcggtcggcagccatcgccaccgcgctcacgcccgaggcgcagaagcggttgacggtgatgccgcccacggtattgggcaggcccgacagcagcgcaccgatgcgcgccacgttcaggccctgctgcgcctcaggaatcgcgcagccgacgatggcgtcttcgatcagcttcgggtccaggtccggcacctgcgccacggcagccttcaggatggttgccagcaggtcgtccgggcgcgtgttcttgaacgcgcccttcggggccttgccgatcggcgagcgggtggccgcaacgatatatgcgtcttgcagttgtttcatgatgtcggttcctcgcttgccctgttagttacgcaccggcttgccggtctgcagcatgcccatgatgcgctcctgcgtcttgccggtgccgagcaggtcgacaaaggccttgcgctccagcgccagcagccagtcctcgctcaccagcgagccggcctcgacgtcgccgccgcacaccgcctcggcgatgcggctggcgatcaggaagtcgtgcgtcgagataaagccgccgtcgcgcatattgaccagcgatgccttgatggtggcaatgcccgagcggccggccaccgggaccagcgtcggcagcggcgcgcggtagccggcgctggccagcgcgcgcacttcgttctgcgccacgtacagcagctcgtgcacgttgaagacgatcttgtcggacggctgcaggtagcccatctggcgcgcttccagcgccgaggccgagaccttggccatggccgcgctctggaagcggctggtcaggaactgcaggatgttggtgctgcccgcggcctgcgccgcgcgcgcggccgccagcgcggcttccttcaggccgccgccggccggcaccaggcccacgcccacttcgaccaggccgatatacgtctccagcgcggccacgcgcgaagccgaatgcagcatcagctcgcagccgccgcccagcgcaatgccggacgccgcggacaccaccggcaccgaggcgtacttcacgcgcatcatgccgtcctggaacctcttcacgaacggttcgatgcccttggcgccgcccatcatgaaggcgggcatggccgcttccaggttggcgccggcggagaacgggccacccggtgcgcccagctgcagcgaagtcggctgccacaccaccagccccttgtagccggcttcggccaggtcgatggcgcgggtcaggccgtcgatcacgtccggcccgatggtgttcatcttgctcttgaacgagaccaccagcacgtcgtcctggccttcgctcacccagatgcgcacggcgtcgttctcttcgacggtgcggccggccttgcgcggatcggccgcggcagtgcccttgatcgcggcacggaatgcctggcgctggtacaccggcagcttgctgcgcgcgacgaaggactgcgtcgccggcgaccacgaaccggcagcggcgtgcacgccctggttctctgccaccgggccctcgaatacccatgccggcagcggcgcggccgacagcgccttgccggcttccacgtcttccttgacccactcggccacctgcttccagccggccgactgccagtcttcgaacggacccgagttccagccgaagccccagcggatcgccaggtcgatgtcggcggcggagcctgcgatctgctccaggtagacggcgatgtagtggaacacgtcgcggaacaccgcccacaggaactgcgcctgcgggttggtcgactcgcgcagcagcttgatgcgctcggccgcatccttcttcagcatgcgcaccacgatctcgtcggccttcttgccggcatcgacgtactggccggtcttggcgtcgagcaccttgatggccttgccttccttcttgtagaagccggcaccggtcttctggcccagcgcgcccgcgtcgaccaggcccttgagtacggccggggtcttgtacaccggcgcgaacgggtcgtcgtgcagggtgtcctgcatggtcttgatcacgtgcgccatggtgtccaggccgaccacgtccgcggtgcggaaggtggcggacttggcgcggcccagcttggagccggtcaggtcatcgaccacgtcgaacgggatgccgaacttctcggcttcggcaaacacggccaggatcgagaagatgccgacgcggttggcgatgaagttgggcgtgtccttggcgcgtaccacgcccttgccgagcgtggtggtcaggaaggcttccagctggtcgaggatctgcggctgcgtggtcgcggtcgggatcagttccaccaggtgcatgtagcgcggcgggttgaagaagtgcacgccgcagaagcgcgacttcaggtccgcatcaaacccgtcggacagcgctgtgatcgacaggcccgaggtgttggtcgcgaagatcgcgtgcgaggccaggtgcggcgcgaccttcttgtacaggtcgtgcttccagtccatgcgctcggcgatcgcctcgatcaccaggtcgcattccttgagcagcgcgatgtcgtcctcgtagttggccgcctggatcaggccggcctcttccttgatgcccagcggcgcgggcgagagcttcttcaggttctcgatggcgcgcagcgcgatgccgttcttggggccttccttggcgggaaggtcgaacagcaccaccggcacgcgcgcattgatcaggtgggcggcgatctgcgcccccatgacgccggcacccagcacggcgaccttcttgacgatgaaattggacatgctcgctcctggattagtgagcgttagacagatgcgaagccgtcgttcccggccgggaacgacgggtagagtcgactcagaacaggtctgcgtccagcgccatcagcgtggccgaaccggcgcgcgccttgcggatctcggcggcggtttccggcagcagcctggcaaagtagaagcgtgccgtggccagcttggcggtgtagaacttgtcgccgctcgcttccttctccagcgcgatcttggccatgcgggcccagaagtatgagaacaccaggtggcccaccacgcgcaggtacggcaccgcggcagcgcccacctcgtcggcattgcccatcgccttcatgccgatttccatggtgagcttctgcaccttgtcgccaatgtcggcgagcgggttgatgaactcctgcatggcttcgttggtgccttcggcttcaacgaattcctgcacgatcttgccgaaggccttcatcctggcgcccatgtcgcccaggatcttgcggcccagcaggtccagcgcctggatggtgttggtgccttcgtagatcatgttgatgcgcgcatcgcgcacatactgctccatgccccactcggcgatatagccgtggccgccgaacacctgcatgccctcattggtggacgtgaaggcgttgtcggtcaggaaggccttgatcaccggcgtgagcagcgcgaccaggtcgccggcctgcttgcgcacggcttcgtcagggtgcgacaactcgcggtcgatctgcagcgcggtccagtagctgaaggcgcggccgccttcggcgtaggccttctgcgtcagcagcatgcggcgcacgtccgggtgcacgatgatcgggtcggcgggcttgtccggcgccttcgggccggtcagcgcgcgcatctgcaggcggtccttggcgtaggccagcgagttctggtacgccacttcggtcagccccaggccctgcgcgcccacgcccaggcgcgcggcgttcatcatcacgaacatggcgttcaggcccttgttgggctcgcccaccatccagccgcgcgcgccgtccaggttcatcacgcaggtggcgttgccgtggatgcccatcttgtgctcgatcgagccgcacttgatgccgttgcgctcgcccgggttgccgttggcatcggggatgaacttgggcaccacgaacagcgagatgcccttggtgccgcccggcgcgtccggcaggcgtgccagcaccaggtggatgatgttctcggccatgtcgtgctcgccggccgagatgaagatcttggtgcccgagatcaggtaggaaccgtcggcctgcggctctgccttggaacgcaggatgccgaggtcggtgccgcagtgcggctcggtcaggcacatggtgccggtccacacgccggagaccagcttgggcaggtaggtctgctgcagttctggcgtgccgtgcgcgtgcagcgcctcgtacgcgccgtgcgacaggcccgggtacatggtccaggcctggccggccgagttcagcatctcgtagaccacattgttgatcacgatcggcaggccctggccgccgaactcgggatcgcacgccagcgccggccagccggcctcgacatactgctggtaggcttccttgaagccggtgggagccttgaccacgccgtcgccgacgtaggtgcagccttcgcggtcgcccacctggttgagcgggaacaccacgtccgagcagaacttgccggcttcctcgataacctggttgatggtgtccgcgtcgatgtccgcgtgcggcggcatcgccttgagttcggcttcggcgccgagcagttcatggagcacgaactgcatgtcgcgcaacggtgcggtgtactggcccatctgagactccttggagttgtgcgatgccgccacgccgcccgtcccgcttgcgcgatacggtccgaccggggcgacctcaggtacggtaagactgaatcagcttgttgagcgcgaccatggcaagctcggcactgtcaggcaggcgcaggaaacgggcgtcatgatgcaagcctagttcaaggctgtacatctcgaacagcatcaggcgcggatcgcagtccgcgcgcaggtgcccttcctcccgcgcctggttgatggcgcgcgtgagcgctgcccgccagatggtgacgctcttgaccagctcgtcacgcaccaggctgccggcacggtcgtcgtactccacggcgccgctgatgtagatgcatccagtcgtcacttcctggatgcgcttctccatccagcgccgcaccatcgaccatagccggggcaggccgcgcggctcctgcagcgagggatagaacacctcctgctcgaaccggcggtgatactcccgcaccacctccacctgcaggtcttcgcgcgaaccgaaatgcgcgaagacaccgctcttgctcatctgcatgcgttccgcgagcagcccgatggtcagaccttcgagcccgtcgcgggacgacaattccagtgcggcatccagaatcgccacgcgcgtcatttcacccttgcgcattggcgcgggggaggcggcggcggattcgagacgggctgactggtgtcgcatgttttttctccgttctgcgggaccctgctgcggccccgcgtatgaccctgacgttgcattatttgcttgcggccgaaccggcggatttgccggtgcataccgcgaatgcacgcagtctaagccaaaaaagaacggtcgttcagattattctggcgcagcagccgaccatcaagcttttaattagaccgctgtttctaaacggactgcaatgcagcatgtccgtcatgtcggtcatggcttgcgccgcgaccggttgcagcgagcgccctgccgcatggcagcaaacgcacaccgcgttcgcggctgtcgttcagtagcgccccgcgacaccggcaatgacgacacccaggcgcagcagcatataggccgcccagttggccagccggtgcagcggcgagcggcgcgcatgcacctcgggcatcacgcgcacgctgcggtgcgcaatggcgtattccagcgcggtgcgcagttcagcggcgaaggccgcatcataaacggcgacgttggcttcgcgcgcgagcagcaggctgaacgggtccatattgctcgacccgaccgtggcccaggcctcgtcgaccacgcccaccttggcgtgcaggaagctctcggcatactcgtagatctcgacgccggcctccagcagcgaggcatacagcgcatgggtggcgtagtgctgcagccggtattcgacccgcccctgcagcagcagccgcacgcgcacgccgcgcgcgcggcaggccagcagcgcgcgccgcatcttgtggccaggcaggaagtaggcgttggcaaggatcacgtcgtggcgcgcggcgcccagcgcgcgcaggtattcgcgctcgatggtgcggcggttgcgcaggttatcgcgcagcagcagcgcggcgcgtacgccgcccgcggcttccgggcgcggcggcaggtcggtgaccagcgggtagtcggccaccgcggcggcgcgttcggtgccgtgcatatcgcgcagcgacaagcgccaccagagccgctcggcggacagcgcgatgccgtccaccagcgggccgccgacctgcaccgcgaagtcatagcgcggccccaggttggcgccttcgaacgggccgtggttgtggtcgtcgatgatattgatgccgccgacaaaagccacgcgccggtcgatcaccgccagcttgcggtgcagccggcgcaggtggcgccgcgccagccggaagccgcgcagcatgcggaatacgcgcagttgcacgccgccggcgcgcagccgcgcggccagctcggcgggcatgtcgccggcgccgaatccgtccacggtcacgcgcacggtcacgccgcgcgcggcggcgcggatcagcgcgtcgctgaccgcgcggccgacctcgtcatcggcatagatgtaggtttccagcatcacctggaacgcggcctggtcgatggcggcgatcagcgcggggaagaagtcctggccgccgtgcagcagccgcaccgcattgccggtggtgggcttgccgcggcgccaggtccagcgcagcatgtggcggcgcggcgcgtggtcgccggccgctgcggggtcgtgcgcgcgggtgtcggcatgagcggagtgggagatccgtgacatgccgtgattatcggacagattgccgggcgcaaggcgccgcgcgcacattggcaggcgcatctctgctatcgtcgagactgatgcttgcccgcgcagccagcgacgggcaagcgacgactgacgcccccacggaacccattgtgaaggtattcggcattaccggatcgtccggcagcggcaagaccacgctgctggaccagctcatcccctgtttcgtcgccgccggcctgcgcgtggccggcgtcaagcatacccatcacggctttgaccccgacacgcccggcaaggactcctggcgcatgcgcgaggccggctgcgccaatgtcgtgctggtcggcgcgcgccaccttacgctgatgcgccactacccggaagcggtgccctcgcccgaactggacgatgcgctcgccgtgctgccggccgacaccgaactggtgctggtggagggctacaagcgcagtgattttcccaagctggaggtatatcgcccggcactggggcgcacgccgctgtgggacgaggtgccgggcgtggtggcggtggcaagcgacgaccctgccgcggtcgctgccatgaccgcgctgccggtgctggacctgaacgacccgcaggcggtgttcgccttcatccgcgactatccggacagcgcgcgctgaattcaggcggccttgccggcgggctccgcgggcatggccagctcgccccgcggatgccccagttccgccaccagcggcacgtgatccgagcgctgcgcccagtcgcggccggtcagcgcatgcgcgcgctcgatctcgtagccgcgcacatagatgcggtcgagctgccaccacggcatatggctggggaaggtatgcagccgcgcaccgcgcgcgtgcgaggcctcgaccgcgcccagcgtattgcagatctgcgcatcgagccggtggttccagtcgttgaagtcgccggcgatcaccagcggcatgcccgcgggcaccacggtgcgcacacgctccaccagggcctcggcctggcgcacgcggctgcgcgcgaacaggccgaaatgcacgcagatcaggtgggtttccaccccgtgcacatccgccaccgcatgcagcagcccgcgctgctcgaagcggtggtcggaaatatccaggttttcggacatcaggatcgggtggcgcgacaggatcgcgttgccgtgatggccgtagtcatagaccgcgttgcggccgtagaccgagtgcggataggcgtcagtggccaggtagttgagctgcgtatgctccggatcgaacagcgccgcggccaccagccggtcgttgcggtcctgcacttcctgcaggaagacgatgtccgcatccatcgcatgcaggccggcgcgcacgttctggatgcgcgggcgccgcgagatgccggtcactcccttgtggatgttgtaggtgaccacgcgcagcttcatggctgcgctccgtataccgcctgccgctcgccagcgccagccccggccgcgcgccaggcgagctggcggatggcctcggcattgctgctggaaaagcattgctgcgccgcctgctcccacggcagccactggtattgcaggtgttcgcgtggcgccagcgtcaccggcagcgcctgctgcacgcgcagcccgaaccagtgctcggtattgcgcgtgacgccttcggcgtagcggtggcgccactgcgggtagatctcgtactggatggtgtgggcccagtcggtcagctggtgctcgccggcgatgatgccggtttcctcggccacttcacgcgcggcggtcagggccaggggttcgtccagggtgtcgaggctgccggtcacggactgccagaaccccgggcgatcggcgcgttccagcagcaagacttgaagatctggcgtgtaaatcaccaccagcacggattccgggatcttgtaggacatgggtctgggcgaaaggacaaacccaaggatagcgcagccgtgccacgttgccacgcgaaagcgtggcggcgcacgcccgggtcgaccctcggcggccttcaggcggcgctgcgcgtgccataggtggcacggggtgccaggtacggctcgtcggcggcagtgcgctgccaggtgtcgaacacctggggcgaatcgccgtggccccaggcggcacgcagctggtccatcagcggcgccagcgcctggcggtagcgcttggacgcgccatgcgcgtgcgtggccagcgcgtcggcgcggtgccggacctcgccctgcagccgcgtgcgctccagcgcgatttccttctcgcgctgtcccagcgagttgtacttctggatcaggaagcgctggtaatcgccgccatccatgccctgcgccgcctgcgcgttgacctgctcgaaacgcagcacgatgctgccggtttcctgctcgatatgggcaacctcggcgtccagggcctgcagcgcctcctgcacgcgctgggcgtcgcggcgcagtgcctgcacctgcgcggcctcgtcctcgaacacgcgctgcgcatccaggtaggcctgcaccaccggctgcggcgccaccaccagcagcgggtcggcgccgtcggcgcgctggccggccagcaaggcgtcgtcggccaggcgcaggttgccgagctcgtccagccagcgcccgcgcgtcatgaccacgccgacggtatccagcgccagccggcgcagcgcttcggcacgctgcatttccaccggctcggccgccgcggcgggcgcggccgactgcaccgcatgggcgatgtcgggcacgcaggcggccaccgtggtggccaccgattcagacatggcctgcgccgagcggcgcacggcgcggcgcagctcgaagcgcgccagcagcatcatcaccagtccggccaccagccaggtcaggatggtttggtcatgggccagcaggaactggcggatcaggtcgatatccagggtcacgaatttcctcccgagtgccggaagccttcattgcgaggccgctcggcaaattacgtgtcaaagagagcagaccccgccgcggcgcccttcgttccgaccggtaacaaatcgaaaccaatgcgccgcgcgcctcacagcgcaggcgcccagacgttgcgcataaagcaaaaaagccgcgcaatcgcgcggcttccttgcggacttcaggcaactcaggccgtcggcttgggctccgtggcgcgcaggcggatgtgcagttcgcgcagttgcttctcgtcgaccgagctcggggcctgggtcagcaggtcctgggcgcgctgggttttcgggaaggcgatcacgtcgcggatcgagtcggcgccggccatcatcgtgacgatgcggtccaggccgaaggccaggccgccgtgcggaggcgcgccgtactgcagcgcgtccagcaggtagccgaacttggcgcgggcttcatcgtcattgatgttgagcgcgcggaacaccttgctctggatgtccgaacggaaaatccgcaccgagccgccgcccatttcccagccgttcagcaccatgtcgtaggccttggccaggcacttgcccgggtcggtctccaggtattccaggtgctcgtccttggggctggtgaacgggtggtgcatggccacccagcgcgcgtcttcctcgtcgtactcgaacatcgggaagtcgaccacccacagcggcttccaggtgtcttcgaacaggccgttggccttgccgaagtcagagtggccgatcttcaggcgcagcgcgccgatcgagtcgttgaccaccttggccttgtcggcgccgaagaagatgatgtcgccgtcctgggcgccggtgcgcttgaggatctcggcaatggcggcgtcgtgcaggttcttgacgatcggcgattgcaggccgtcgcggcccttggccacttcgttgaccttgatccaggccagtcccttggcgccgtagatgccgacgaactgggtgtaggcgtcgatctcgccgcgcgagatcgcaccgccgcccggcacgcgcaggccgaccacgcggccgttgtcgctgttggcggggctcgagaacaccttgaagtcgacgtccttcatcacctcggtcagctcggtgaattccagcttgacgcgcaggtcaggcttgtccgagccgaagcgggccatggcctcgcggaactccatcaccgggaacctggcgtccaggtcgacgtcgatggcgttcttgaacaccgtgcgcatcatgtcctcgaacaggtcgcggatctcctgctcggtcaggaacgaggtctcgcagtcgatctgcgtgaattccggctggcggtcggcacgcaggtcttcgtcgcggaagcacttggtgatctggtagtagcggtcgaagccggagaccatcagcatctgcttgaagatctgcggcgactgcggcagcgcgaagaaatggcccgggttgacccgcgacggcaccaggtagtcgcgcgcgccttcgggcgtgctcttgcccagcatcggggtctcgatgtcgataaagccctgcgcatcgaggaacttgcgcacttccatcgccaccttgtagcgcaggcgcaggttgtactgcatctgcgggcggcgcaggtccagcacgcggtgcgtcaggcgcgtggtttccgacaggttgtcgtcgtcgagctggaacgggggcgtgaccgacgggttcagcacggtcagctcatggcacagcacctcgatcttgcccgaggtcaggttggcgttctcggtgccggccggacgcggacggaccttgccggtgacgcggatgcagaactcattgcggatctcttcggcggccttgaacatctcggggcggtccgggtcgcacaccacctgcaccaggccttcgcggtcgcgcaggtcgatgaagatcacgccgccatggtcgcggcggcgctggacccagccggtcagggccacttcctggcccgagaattgttcggtcaccagaccgcagtagtgagtacgcatggaggacataaggagattcccggtaaaacgcggccgcccgaagcacatcgggcggcccgtgatcagattggatgcttaaggatcggtcgtctcgaccgtttcctcgctgctggccctgccggccggattggccggggctgccggccgggacatgctgccgttcttgcgcggcaattccgccggtgccaccacgcccatcgagacgatgtacttgagcgcggcgtcgacggtcatgtcgagttcgatggtgtcggccttgggcatcatcaggaagaagcccgaggtcggattcggcgtggtcggcacgtagacgctgacgtattcgccctgcaggtggttctgcacgtcgccgccggggcgcccggtcaggaaggcgatggtccacgagccctcgcgcgggtactgcaccagcagcgccttgcggaaggcgttgcccgaggacgacagcagcgtgtccgagacctgcttgacgctggtgtagatcgggcccaccaccgggatatggcccagcagcgcttcccaccagcgcaccaggcgctggccgatgaagttatgcgccagcaggccgaccagcaggatgaccagcagcgtgaggatggcgcccaggcccgtcacgcgcttgccgaacatcagccggtccgggcgccaggcctcgggcagcagcgccaggctctggtccatcgtgccgatgatcaggctgagcacccacagcgtgatgcccagcggcaccagcaccagcagcccggtcaggaaccaggttttcagggcggaagtcttcttggcaaccacggggcgggtccggctcaatggcaggcgcaggcgctgccgcagccgccggctgccgcgggcgtggccgaagcggacgaggcaggactggccggcgattcagccgccgccggggtgctggccgccgctgcagcggcgccaccagcggcgccggtcgctgtcggcgtgccggcgctgccgccgcggaagtcggtcacgtaccagcccgagcccttgagctggaaaccagcagcggtcagctgtttcttgaacgcgccggcggtgccgcacgacgggcagtccgtcagcggggcatcgctcattttctgcagcacatcgcgcccgtggccgcaggcgtcgcaacggtaggcatagatcggcatggtgttatttcgcgagaaaacttcggaattggtacaaaggcggacatcggcgcgggccatggcggccgcgggaagttcccgtgcgacgatgcaaagccttgaattataaaccgttccggggccgcctgatcgccggaaatgagggggtggcagaccccgggccgtcaggcgatatgcacttccttgaccggcgcgtgatctgcaatccactgcggcagcagtgaaccgatcaccatgccgctgatcgagaacagcaggcccaccatttgcggcggcaccacggcatcggcaaaggccacctcgcaggtcagccaggaggacaggcccagcaggatcgccgccagcccgccctggcgggtggcgtgcttccagaacatgccgaaggccaatggcacgaaggacgagaccagggtgaccttataggcattttcgaccatatgaaagatcgacaggtgcgagttgagcgcgaacagcgtcaccagcgcggtgaacaccagcaccacggtctgcatcacgcgcaggaactgccggtcgtcgaggtggcggaagtacgggcgcaggatgttctcggcaaaggtcaccgacggcgccagcagcgtggccgacgcgcaactcttgatcgccgacagcagcgcgccgaagaacatcacctgggcgaacatcggtgcgtgctgcaggatcagcttcggcaggatcagctgcgaatcggtgtcgatgtacctggccaccatgccggggtcgatcagcgtggccgaatacgccaggaacatcgggataaaggcgaagcagaagtacagcacgccgcccagcaccgaggcgcgcccggcgatctgctcggtgcgcgacgaggtcacgcgctggaacacgtcctgctgcgggatcgagcccagcatcatggtgaacagcgccgccgcgaagccgatgatctgtatgaaatccagcgacggcaggaactcgaacttgccggccgcggccgcgtgcgacaccaccgccgtgacgccgccggcctggccgctgacctcgtagccgatatagagcatgccgatcacgatgatgatcatctggatgaagtcggtgatggccaccgaccacattccgccgaacagcgtatagaccagcacgctggctgcgccgatcatcatgccggcctcctgcgacagcgcgccgtccgagacggtatagaacaccagcccgagcgccttgatctgcgccgccacccagcccaggtaggacaccacgatgcacagcgtggtcagcacctcggccagccggccatagcggttgtggtagtagtcgccgatggtcagcaggttcatccggtacaacggccgggcgaagaacaggcccaccaggatcaggcacagcgacgagccgaaggggtcggagaccacgcccgacaggccttccttgaggaatacggcggggatgcccagcaccgtctccgagccgaaccaggtggcgaagacggtggcggtgacgatatggaatggcaggctgcgcccggcgacggcgaaatcggtggtgttgcgtacgcgcagcgccgcccacaggccgatgccgaccgagattacccagtagatgatgacgaaccagatcagcatgccgctgccctatgcagaagtgcccttgtggcgagaaaccgaatgccgggcggcgcatgagtgcacgttgcttgcgcgcatctgcccggagtccaattcatcggtcggggccgcatatcgagctgcctggagttctcgcgctgggcggaaaacgcggccggggctgcggtcgtagccgaatcaaaacgcggattatagcgacgcagaccagcgtggacgaaaaaaattccccgctggcgcaaatgcgccacgcggagcatcgcctgcgccacaagggctggccggcggctgcttcagccggaccggcggcgccagacctgccagcgctcctgcccctggaacaccggcagcggcgcggccgtgggccggtcctcaagtcgctcgaaggccggtgccagcagcgcgtccagcgcctcggccggcatcgcgaacggcggcccgccgcggttttcgccgaggtagaagtagccggccagcaggccgcccggcggcagcagttgcgcgacccgggcggcatagtcggcccgcatcgccggcggcagcgcgcacaggaaggcccgttcgtagatcagctcgcacggcggctgcggcgtgaaggcaaagaaatcgccctgctgcaccactacccccgccggccccagagtttgccgcgccgacgccaccgcctgcggcgagaagtcgattgccgtcaccggccagccacgctcgaacagccacgcggcctcccagccgttgccacagcctggcaccagggtcggacatggggcacggccttcaatgaactgccggaattcctcgggcacgccgccctggtcccagggcgtgaagccctgttcgaaacgctcgtcccagaatgccgggtcggcggcgttgcgggtggcgaaggtcggcacgggcttggcagggtcgctcatggtcacctcaaaaatggatcagcctgggtgcgctaccagtagcccgcccagcccagcacatgcgtcagcacgatgccggcgacaaagccgcccagcaacagcagcccggtgccgagcagccggttggtgcggcgctgctccaccaccagcatcgccagcagcttgtcctgctcgccgttgctggtcagcgcgcgccgctccaggaactggtgcgccaggcgcgggaagtcgggcagcatcttggcccacagcggcgcctccaccttgacccgctcccaggcgcccttccagcccacctgctcgtgcatccagcgttccaggaaaggcttggcggtcttccacaggtccaggtcggggtcgagctggcggcccaggccttcgatattgagcagcgtcttctgcaggagcaccagctgcggctggatctcgacattgaagcggcgcgaggtctggaacaggcgcatcagcaccatgcccagcgagatttccttgagcggcttgtcgaagtacggctcgcagcaggcgcgcacggcgctttccagctcttcgacacgggtgtctggcggcacccagccggactccacgtgcagcagtgctacgcggtggtagtcgcgccggaagaaggcgatgaaattctgcgccaggtagttcttgtcgaactcggacagcgcgccgacgatgccgaagtccagcgcgatatagcggccgaaggtctcgggctgcaccgacaccaggatattgcccgggtgcatgtcggcatggaagaagccgtcgcgaaacacctgggtgaagaagatctcgacaccctcttccgccagctggtgcatgtccacgccggcggccttgagcgactcggtgcgcgagatcgggatgccgtgcatgcgctccatcacgaacacggtgctgctgcaccagtcccagaacacctcgggcaccagcagcaggctggtgtcggcaaagttgcggcgcagctggctggcattggccgcctcgatcatcaggtcgagttcgtcgtgcagatacttgtcgaactcggccaccacctcgcgcggcttcaggcgcttgccgtcggcccagaagcgttccagccaggtggccatgtcgcgcatcagcgccaggtcgctgtcgatcaccggcagcatgcccgggcgcagcaccttcaccgcgacctcgcggccgtggcaggggccgcccttgagcgtggcgaagtgtacctgtgcgatcgaggcgctggccaccggctggtgctcgaaggtctcgaacagctggtccagcggccgccccagcgcgcgctcgatgatcttcaccgccaccaccgaatcgaacggtggcacctggtcctgcagcttggccagttcgtcggcaatgtccgccggcatcaggtcgcgccgggtcgacagcacctggccgaacttgacgaagatcgggcccagccgcgtcagcgccagccgcaggcgctcgccgcgcggcatctcgagcttgcgcccgatggtgatgacgcgtaccaggaagcggatcctgcggctgctgaagcccgagagcaccagctcgtccaggccgtaatagaggatgacgaagagaatcttgccaaggcgcaggaggcgggtcattcgggagtcttcacagggccgggcaggcagtcatgttgttggtggatgggatcggggcgcggccggctcagcggtgcggcgacggcagcttgccggactggcccgactgtccggaagccggcggcgggccggcgcgctccagccgctccagccgtttttcgagccgggccaggctgtcgcgcagccggcccacgtcggtgccgaaggcatcgagcgcggcgtggcgcaccagggtcggatgctcgtccagcaggtagtcggtgacgttgtcgaccagggcgcggcccacgcgcgtggcctgctcatgcacctggcgcgcgccgtcgaccacgcgctgcgccacgctgtcgctcaccggcccgcccaggatgccgcgcagcgcgcgcgacaggtcttcggcggcgtcccagcgcaggttgcgcgccagcgtcgagatggtgttggccagctcggcgtcgccctcgatgcggacatggcgcatggcggcggcctggccgccttcggccacgtcggcggccaccagcggccactgctgcaccggcacacgcagcgtcaccgcgggcgcctcggcctcgggcgctggttcggtgcagccgtgctccgtcaccttcagcgacagcacgaaggcggccgcatcgaagcggatcacgcgcccggcaaacggcgtgagctggttgcgggcccacggctcctgctcaagcaggtggttcagcgccgagatggcgggcatggccagggcggaaggcagagtattcatgacagcgcggttggcgggcaggcagcgacgccgcaggtcgggcgtcccaaacaaaaaaaggcccacgctttcgcgtgggcctccattctaagctactccccccggcgcatcaccgccgcggggtgcggcatcaggactcttgctggatgccggccagcagccagccgccggtgccgctggcaggcttggccaggttccagacctcgccgaacggctgggccgcctcgccggacttctcgcggatcatgcccgagaagcgcacgctggcgatatgctgggccgcagccgactcgatgccgagcagctgggcttccagcgtgaccacgtcggtcttgttgacctcggcgccgcggtcggccaggtccatcttgatctcggcgaacatctccggcgtggtgaactcgcggatgtcgtccaggttgcctgcatcccacgcggcctgcaggcgcacgaaatgaaccttggcgttgcgcaggaaggcttcggtatcgaagtcggccggcacgccccacggctgctgggccaccgcatcggccgcgaccggggctgccgatgctgccggcagtaccgtattggcggccgggcctgccgggctacccgaagacacaggcgtcggctcgccgcggaacatgggctcggcgctgcggcccaggttcggcgcgttgccggcgccggcgtaggccggctgctgggtgcgcttgctgccgccacggaacttgcggatcagccagatcgcagcgaacgccaccagcgcgatcaggatcagattggacaggaagctcagcgccgccccgcccagaccgaagtgcgacagaagccagccgatacccaggccggcggcgatgccgcccaggatgccgccccagttgcgcttgggcgccgcggccgcggccgcgccggccgcaccggccgttgccggagccgcctgctgtgcgggctgctgcgcctgctgggtcggcgaagtgggctgcggcgcctgctggcgctgcgtgaccgactcagattgcttgccgatgctgcgcgaaccgcccatgcgcttggcattggcgtcgaacattactcccaaggcaatcgcggtgatcagcgacccaaccaggaatttcccacgaaatgacgacatattctgctatcccctgtcagtttcatcctatatgcgggcgaggcatggcgatttcaagtcttcttaatacttgcgcccgacgtggagcgccaccactccggccgtcagattgaagtattcgacattttccaggccggcatgttccatcaagcgtacaagtgaagcctggtctggatgcattctgatcgattccgcgagatagcgatagctgggggcatcccctgccacccgctcacccagccacggcagcaccttgaaagaatagacgtcgtaggccttctccaggggtttccacaccttggagaactccagcaccatgaccttgccgcccggcttgaccacgcggcgcatctcggccagcgcggcatccttgtgcgtcatgttgcgcaggccgaaggccacggtcaccaggtcgaagtggttgtccgggaacggaatgcgctcggcgtcgcacaggcacaccggggtgacgatacccttgttcagcagccggtcgcggcccacgcgcagcatcgactcgttgatgtcggtcagccagacctctccggtcgggccggcctgcttcgcgaacgccttggccaggtcaccggtgccgccggcgatgtccagcaccttgtggccggggcgcacgccagcctgggcgatggtgaacatcttccagagccggtgcatgccgcccgacatcaggtcgttcatcacgtcgtacttgctcgccaccgaatggaacacgccggcaaccttgtcggccttttccgcttcgtcgaccttttcaaacccgaagtgggtttcactcatctttcagactccagggtaatcggttcggcgcggctcagtgatggccgcagccgtggccgccggcagcgccggcggcgggcatcggggtgtcgcggtcggcgccggcggcttccaggcgctgcaggtagtcctgccagagcgcgtcctggttgtcgccgaggcggtacagcaggtcccaggaatagatgccggtatcgtggccgtcggtaaagcggatctggatcgcgtagttgccgaccggctcgaccgcgttgacgcccacctcgcgcttgccggtctgcagcacttcctgccccgggccgtggccctggacttcagcggacggcgaatacacgcgcagcagctcgaacggcagccggaagctgcggccgttgtcgaagccgatctccagcacgcgggattgcgtatggacggtcagcgcggtgggatgaggggtgtctttttccaggcctgccatgatgatcgcggcccggttagggtcgctcctgagggggtgattgccgcgcgatgctgccggtacggcacggcatcacgcttcgcatacgacccgatagcttaccccaggctcgccggcttgcgcagcccgggccgcttccccgtcctgcggcacgtaacgcaggcgccgttgatgataggccgccacggtgctgcggtgggcaatactgatgatggccgcctgcggcagcgactccaccatcagccggtacatggcgccttcggtttcctcgtccagcgcgctggtggcttcgtccaggaacaggtagtccggcttctgcagcagcgcgcgcgcgaaggccagacgctgctgctcgcccggcgaaagccgcagcgcccagttgtcgaacacgtcgagctggtccgccagcgccgccagccgcgcctggcgcagcgccgcctgcagcgcttccgcgctatgcacggtgccggcgtccgggtaagccagcgcatcggccagcgtgccgatcggcaggtagctgcgctgcggcaggaacagcatgcgcgcgccgtcgggcatggtcacggtgccgctgccgtacggccagatccccgccagcgcgcggaacagcacgctcttgccgcagccggacgggccgctgaccagccagcgctcgcccggcgcgaccgacagcgagaacggcgccaccagcggccgttggcccacggccgcgctgcgcgcggcgcgtaccggcagtgccagcgccaggccgtcgatggtgatgccattctgcggcttgccggtatgttccacctcgatatcgcgcacgccgcccggcgccaagtcctggcgctcggccacgcggatcgcttcctggaaatcgatcaggcggttggcggccgccttccagcccaccagcgtggcgtagctgtcgacaaaccacgacagcgcgccctgtacctggccgaaggcggagctggtctgcatcaggccgccgagcgtcatcttgccggcgaagtagcgcggcgccgccaccaggatcgggaagatgatggcgaactgcgcatagccggagctgacaaaggtcagccgccgcgtatagcgcatcagctggttccagttggcgcggatgcggtcgaagcgcgcgcgcaggccggcctgctcggtgggctcgccgcggtacagcgccaccggctcgctgttctcgcgcaggcgcaccagcgtgaaacggaaatccgcctcatactgctcctgctggaagttcaggccgatcagcgggcggccgaccacgtgcgccaccagcgagccgatcaccgcatagcccgccgcgaaccacaccatatagccggggatggtccactcggtgccgcccagcgcaaagctgatcggccccgataccgtccacaggatgccgacgaaggacagcagcgtcaccaccgagttgagcagcccgagcgacaacgacagcgcgccgtccgtgaacaggcgcaaatcgtcggcgatacgctggtcggggttatcggtggtgtgggtctgctcgatgcggtaataggcctggtgcccgagccagtggcccatgaagcggccggtcatccaggtacgccagcgcatctgcagcatcatggtgtagtactggcgcgagatcgccgccacgatgaagaacgccgcgatccacgagaagcgcagcagcagcaccttgaacgaggcgtagtcgcgctgctccagcgcgttgtagaacacgcggttccactcgttgagcagcacgttgatatagacgatgccgaggttgagcaccaccaccagcgccagcaggccaagcccggcgaggcggtcctcggatttccagtaaggcttgatcagcgcccacgtggcagccatgcgcagccggctctggatcttgagggccctggcagggacggcagggcccggtacggtgactgaggtcggagtggaggacatagcggcagtgcttggcccgtcagcggatgccggccgggcttgttgttctggataccgtggcggcaggccacggcggcaacagcattcagacggtcacggccaggcgtgggttccgcgcgcccctcaggcgtcgccggcttcgagcagcgaaagcgccgtacgcagcgccggcaaccggctggccagctcctgcacgcgcacggcatccgccgcgcgctgcggcgcggcccagattgcctcggggaaatgggtgtcccagcggtagcgcgggatgatatgccagtgcaggtgcggcaccatgttgccaaaggccgccaggttgaccttgtccggcgccatgacctcgcgcaccacccgttcgacacgtgcgaccagccgcatcagccaggcctggtcggcatcctccaggtcgctcagctcggccacgtgatcgttccagacgatgcggcagaagcccgggaaacggtcatgctcgaccaggatcagccgggcgcggtcgcccatccagaccagttcgccgccgtcggtctcgcacaaggggcagttgggtacgcgtgccatcgtcgagatttaaaccagcacccgctcgataccgccggcgttcgccttcgcgacgtactccggcatccagttttccccaagcagatgcttcgccatctcgatcacgatgtaatccgcctgcaccgtggcatcttccttgtagcgcgacagcccctgcaggcacgacgggcagctggtcaggatcttgacgtcgccggtgaagccgtcggcgcgcagcttgtcggcgcccttggtcatttcctcttccttgcggaagcggacctgcgtcgagatatccggacgcgtcaccgccagcgtgcccgactcgccgcagcagcgctcgttcttctcgatcttgcccaggccggtgttgccgcccatcaggtcgttgaccagcttggtcgggtccatggtcttgatcggggtgtggcagggatcgtggtacatgtagcgggtaccggtcacgccttccagcttcacgcccttctcgagcaggtattcatggatgtcgatgatgcggcagcccgggaagatcttgtcgaattcatagccggcgagctggtcgtagcaggtgccgcagctgaccaccacggtcttgatatcgaggtagttcagcgtattggcgacgcggtggaacagcacgcggttgtcggtgacgatcttctcggccttgtcatactggccgttgccgcgctgcggatagccgcagcacaggtagcccggcggcagcacggtctgcacgcccacgtgccacagcatcgcctgcgtggccaggcccacctgcgagaacagccgctccgagccgcagccggggaagtagaacaccgcttccgtttccggcgtggtcgccttcgggtcgcggatgatcggcacgatctcgttgtcctcgatgtcgagcagcgcgcgcgcggtcttcttgggcaggttgcccggcatcttcttgttgatgaagtggatcacctgctcgcgcaccggcgccttgcccacggtcgcgggcggatgcgcggtctgcttcttggcgaatttcttcagcacgtcattgccgaggcgctgcgccttgtagccccagtcgatcatgaccttgcgggtcaggttgatggtctcggggttggtggcgttgaggaagaacatcgacgccgcggtgccggggttgaacttcttctgccccatcttgcgcagcaggttgcgcatgttcatcgacacgtcgccgaagtcgatcttgaccgggcacggcgtcacgcacttgtggcacacggtgcagtggtcggccacgtccgagaactcgtcccagtgcttgaccgagatgccgcggcgggtctgctcttcgtacaggaaggcctcgaccagcagcgaggtcgccaggatcttgttgcgcgggctgtacagcaggttggcgcgcggcacgtgcgtggcgcacaccggcttgcacttgccgcagcgcaggcagtccttgacgctctcggcaatcgcgccgatatcgctctgctgcatgatgatcgactcatgccccatcaggccgaacgacggcgtgtaggcattgcgcaggtcggcgccgggcagcagcttgcccttgttgaagcgcccttgcggatcgaccttcagcttgtaggcgcggaagtcgccgatctcttcctcggtcaggaattccagcttggtgatgccgatgccgtgctcgcccgagatcacgccgtcgagcgaccgcgccaggtccatgatacgggccaccgcgcgatgcgcgtcctgcagcatgtcgtagtcgtcggagttgaccgggatattggtgtgcacgttgccgtcgccggcgtgcatgtgcagcgccacgaagacgcggccgcgcagcacctgcttgtggatcttctgggcttcgtccaggatcggcttgaactcgccgccgttgaagatcttgcgcaattcggcgcggatctccgccttccaggacacgcggatggtgcggtcctgcagcaggtggaacacggtggcatcaggctgatgctgcaggcgcgcatcgaactcctgccccagcagtcccagcccgtgcccgatcagcgaggccttggcctgcgtcagcggcacgtccatgtggtcctgcaggtaacgccagcgcgcgcggatctcacgcagcagcgtcagcgcgtgctgcacgcggtcttccagcagctcggcgctggggatctcgttggcgtcgtcgctgcggcccagcggcaggttgccgcgcgcgaagaacgcttcgagcgtgtcgaccagcttgagcttgctcttgatcgacagctcgatattgatgcgctcgatgccgtcggtgtactcgcccatccggttcagcgggatcaccacgtcttcgttgatcttgaaggcgttggtgtgcttggcgatggcggcggtacgcgaacggtccagccagaacttcttgcgcgcctcggggctgacggcgataaagccttcgccgctcttgccgttggccatgcggatcacttccgaggtggcgcgcgccacggcgtcttcatcgtcgccgacgatatcgccgatcagcaccatcttcgggaaggcgttgcgcttgctcttggtggcgtagccgaccgcgcgcaggtagcgctcgtccaggtgctccaggccggccaggatggcgccgccgggcttcttggtctcggcgtcgaggaagtccttgatctcgacgatgctggggatcgcgtcgcgcgcctggccgaagaactccaggcagaccgtgcggatgaatttcggcatgcggtgcaggatccagcgcgcgctggtgatgatgccgtcgcagccttccttctgcacgccgggcaggccggccaggaacttgtcggtgacgtccttgcccaggccttccttgcggaacttgcggccctcgatggccagcgtctcggtgcgcagcaccttctcgcccggggcgcggttgccgtccgaccatttcagttcgaaggtggccaccggcacgtcgtggatcttgcccaggttgtggtccagccgggtgatctccagccagttgccttccggatccaccatgcgccaccaggccaggttgtccagcgcggtgccccacagcacggccttcttgccgcccgcgttcatggccacgttgccgccgatgcacgaggcatcgatcgaggtcgggtcgaccgcgaacaccaggcctgccttgtcggcagcgtcggccacgcggcgcgtcaccacgccggcgccggagaagatggtcgcgaccttgtgcgacacgcccggcaggtcggtttgctccaccggcccgagctgctccagcttctcggtattgatcaccgcgctcatcggcgtcagcggcacggcgccgccggtatagccggtgccgcccccgcgcggaatgatggtcaggcccagttcgaagcagcccttgaccagcccggcgatctcttcctcggtatcgggcgtcagcaccacgaacgggtattccacgcgccagtcggtggcgtcggtcacgtgcgacacgcgcgacaggccatcgaacttgatgttgtccttctgcgtgaccttgcccagcacgcgctgcgcgcgcttgcgcaggtcgtaggccgcggcgaattcgttcttgaagtcctcgatcgcctgcttggcgaaggcgaccagctgctccacgcggtgcgaacggtcctcggcggcgggctcggcgtgctcggcacggtcggcggcgcggcgcttctcgatctcgttcaggcggtggtgcagcgcgctgaccagcatctggcggcgcttgggattttccagcaggtcgtcctgcaggtagggattgcggcggaccacccagatatcgcccagcacctcgtacagcatgcgggccgagcggccggtgcggcgctcgctgcgcagctcgtccaggatgcgccaggcttcctcgcccagcaggcggatgacaatctcgcggtccgagaaggacgtgtagttataagggatttcacgcaggcgcggcggggcgtcctgcgcggcgagcttggcgtcgagcacgagtggggcgttcattgggggaccgcttcctgctgcgcacggggactgtgcgcgaatcgttcattaaagggcgattgtacttcaacccctgctttcgccgcaccgcaacatagaggaatccttgtcggaacaagggattaggcagctttctggcctggcaatggcgccccacggtggtgccggcaacgcaccggatcagaaccaggccttgaacgtttgcgcaatgttctgccaaaaactgtccgggatccaaagcaggctggcggtcatgaacagatagcggatgaacttgccgaccgccatccaggccaggctgggccagaaggagaggcgcagccagccggctaaagtgcacaaaggatcaccaatgccgggcaaccacgagaacagcagcgtaggcggcccaagccggcgcatccaccggaagtagcgcgcgtcgagcttgggcttgggcggtttgcgcgcgtgctcgcggtgctccaggtgctcacggtcgtgctcgcgcgcccggcgccgcttgtggtagcgcaccagcgccagcttggcggcatagcccagccaccagtcgatggcgccgcccacggtgttgccggcagtggccaccacgatcgccggccagaacatctgcgggttgagcttgacgtagccgaacaccgccggctccgagcccagcggcagcagcgtggccgagatcaggctgaccacaaagatcgcgggcaggcccaccttgggcagggcaatggtttcgaacagccagtcgaagaaggcttccatgtcagggtgagcaagggggccgggccattctagcagcggccctgccaggaccccgccccgcgaatggggagcgggcaaaccacatggcacctgtgctggatttgtgattaactgttagagcctgttgtggccaatcgttcgccggccgcagcattcgcgccagcattgaagccgctcgccgcgtgcgctggcgcacctacagcagttgtagcggcagcaccaatatcacgaattagccgtcctatagccgtcttaagcggcagtaccgcgtcgtggccagtcccacgcagttctttcgggatttcgggcaattggtcatgcgcgtccaccccacatggagacaagcatggcgattccgatccgcctgacggtcaacggcaagcccgttgacgcgcaggtagaacccaacaccctcctggtccagttcctgcgcgaacaattgcgcctgaccggcacccacgtcggctgcgacaccgcgcagtgcggcgcctgcacggtccacctggatggccgggcggtcaagtcgtgcaatatcctcgcggtccaggccgacggcgccgccgtgaccaccattgagggcctcgccgctcccggcacgctgcacccgatgcaggaagccttccgcgaatgccacggcctgcaatgcggcttctgcacgccgggcatggtgatgagcgccaccgcgctggtgcaggaacatccgggcgccgacgccgccaccatccgcgcccacctggaaggcaacctgtgccgctgcacgggctaccacaacatcgtgcgcgcagtgcagcagggccaggcggccatgcagggcaccgccgccagcgctgaataagggggaccggccatgaacgcacccgaaagccagcgcctggtaggcgcgccggtcaagcgcaaggaagactatcgcttcctgaccggcaacggccagtacaccgacgacatcgtgctgccgcagcaaagctacgcgtacttcctgcgctcgccgcacgcgcatgcgcgcatccgctcgatcgacaagaccgaggccctggccgcgcccggcgtgatcgccgtgctgaccggcgacgagctggcggccgacaaggtcggcggcctgccctgcggctggctgatccacagcatcgacggctcgccgatgaaggagccgccgcacccggtgattgcccacgacaaggtgcgccacgtcggcgaccaggtcgcgctggtcatcgccgagaccctgcagcaggcgcgtgacgcggcagagaagatcgacgtcgactatgaagagctgcccgccgtggtcagcgccgcggatgccgccaaggcgtccaccctggtgcatgacgacgtgccggccaacacctgctacacctggggccacggcgacaaggccgccaccgacgccgcctttgccaaggccgcgcacgtgaccacgctggacatcgtcaacaaccggctgatccccaacgcgatcgagccgcgcgcggtcaatgccagctacacgcgccaggacgacagctacaccgtctacgtggccaaccagaacccgcacgtcgaacgcctgctgatgggcgcgttcgtgctggggctacccgaatcgcgcctgcgcatcatcgcaccggacgtgggcggcggcttcggctccaagatcttcctgtacccggaagacgtggcgctgacctgggcctcgaagaagatcgggcgcccggtcaagtggaccgcggaccgctccgagtccttcctgaccgatgcccacggccgcgaccacgtgaccagggccgagctggcgctcgacgccgacggcaagttcctggcgatgcgggtgcataccaccgccaatatgggcgcctacctgtcgaccttcgccagcagcgtgcccaccatcctgtatgcaacgctgctggcgggccagtacgccacgcccgcgatctacgccgaggtgcaggccgtgttcaccaacaccgcgccggtggatgcctatcgcggcgccggccggcccgaggccacctatgtggtcgagcgcctggtagaaaccgccgcgcacgagatgaagatcgacccggccgagctgcgccgcaagaatttcatccgccagttcccgtacgccacgccggtgggcctgacctacgacaccggcgactacgagccgtgcctcgcgcgcgcgcaggagctggccgacgtcaagggcttcccggcccggcgcgacgaagcgaagcagcgcggcaagctgcgcggcctgggctattcctgctatatcgaggcctgcgggctggcgccgtcgaatatcgccggcgcgctgggcgcgcgcgcggggctgttcgaggtgggcgagatccgcgtgcacccgaccggcaccgtgaccgtgttcaccggctcgcacagccatggccaggggcacgagaccaccttcgcgcaggtggtcgccgaccggctcgggctgcagctggaccaggtcgagatcgtgcacggcgacaccggccgggtgccgttcggcatgggcacctatggctcgcgctcgctggcggtgggcggctcggccatcgtcaaggcgctcgacaagatcgaggccaaggccaagaagatcgccgcgcacctgctggaagccgccgacaccgacatcgagttcagcaacggcgtgttccgcgtggccggcaccgaccgcaccaagaccttcggcgaagtcgcgctctccgcctacgtgccgcacaactatccgctcgacaagctggagccgggcctgaacgaaaacgcgttctacgacccgaccaacttcacctacccgtccggcgcctatgtgtgcgaggtggaagtcgatcccgataccggcgagtcgcaggtggtcaagttcaccgcggtggacgacttcggcaacatcatcaacccgatgatcgtcgaaggccaggtccatggcggcatcggccaggggctgggccaggccatgctggagcagtgcgtctacgacaacgacagcggccagttgctgaccggctcgtacatggactacgccatgccgcgcgccggcgacctgcccgacttcaccgtcgagaccgccaccggcacgccctgcacccacaacccgctgggcgtgaagggctgcggcgaggccggcgcgatcggctcgccgccggcgttcatcaacgcgctggtggatgcgctcagcccgctgggcgtgaaggacatccagatgcccgccacgccgcaccgggtctggcaggccatccaggccgcccggccgtgacccacgcacaccgcaaaggaaaccgacatgtacgcattcaattttgaacgcgccgcggatgccaaggcggccgtggccacgctcagggccgatcccgacgccaagttcctcggcggcggccagagcctgctggccgcgatgaaactgcggctggccgcgccctccgtgctggtggacgtggcgcgtattcccggcatggccgagatccgcgtcgaaggcaatgagatcgtggtcggcggcgccgcgcgccatgccgatgtggccgagcatgccgaggtgcgccggcgcatcccggcgctggcggcactggccggcggcatcggcgaccgccaggtgcgcgccatgggcaccatcggcggcgcgctcgccaatgacgatcccgctgccgactatcccgcgggtgtgctggggctcggggcgaccgtggtcaccgaccgccgcaccatcgccgccgacgacttcttcaagggcctctatgagaccgcgctggaaccggacgagctgatcaccgcggtgcgcttcccgatcccggagcaggcggcctacgccaagttccgcaacccggcctcgcgcttcgcgctggtgggcgtgatggtggcgcgcaccggcaacacggtgcgcgtggcggtgacaggcgcggccgacagcgtgttccgctgccagccgctggagcaggcgctgtcggccgccttcaccgcgcaggcggcgcgtggggtgaaggtcgatgcgtcgacgctgaatgccgacctgcatgcgtcggcggagtaccgggcgcatctgatcccggtgctggcggcaagggcagtggaggcggcggcgaaggggtagcgcttcgccgccgcttgttgtctcccctctcccgcacggcgggagaggggagcaaaccgccggcgcttttgtggcgttggcacacaagattgctcatgcttcccacctccatcgacgacaccatcgcccagctggaacgccagcaatacttcgccgaccgcgagaccgccacggtgctctatctcgccctgcgcatgcagcggccgctgttcctggaaggcgagcccggcgtcggcaagaccgccatggcgcaagcgatggcgggcgtgctcggcacgcggctgctgcggctgcaatgctatgaagggctggacgccgccagcgcgctgtacgaatgggactacccgcgccagatcatggcgctgcgcctggccgaggcgcgcggcgagcggcccgaggcgcagtcgctgtaccacgatgactacctgctcaagcgcccgctgctggaatccctgctgcccgaccccgccgcgcccgacgtgccgcgcgtgctgctgatcgatgagatcgaccgcgccgacgagcccttcgaagcgttcctgctggaggtgctgtccgaattccaggtgtcgatccccgagatcggcgtgatccgcgccgagcgcccgccgctgatcgtgatcacctccaaccgcacccgcgaagtccacgacgccctcaagcgccgctgcctgtaccagtggatgggataccccgagcgcgaccgcgaactgcagatcgtggccgcgcgcgcgcccgaggccgccgcggcgctgcaggcccaggccatcgactttatccaccggctgcgcggcatcgacctgttcaaggcgccgggcatcgccgaggccatcgactggtgccgcgcgctgtccgcgctgggcgcgaccgagctcgatccgcagtccgtgcgcgacacgctgggcgtgctgctcaagtaccaggacgacctggcgcgcgtggacggccccaccgtggccgagctgctggcgggtgccacgccgggaggctgaagatggccacgctgcacgccgccgcacggcccgccgcaccggccctgccggtgctggcgcgcaatgtcacgcacttcatgcggctgttgcgcgacggcggcttcgcgctgtcgccggcccatgctgtcgatgccttggaggcgctgcgccatatcgatatcggccagcgcgacgaggtacgcgccgcgctggcggcgctggtgctgtccggccccgaccagcgcccgctgttcgatgccgccttcgacctgttctggcgcgatcccgactgggaaggcaagctgcgcgcgctgctgctgccgcgcgtcgacagcggcgcgccgccaccgaaacgcagcaaccggctggccgatgccctggccgcgcgccagcccgaagcgcagtcacgtccggcacaggccgaagccgagcgcatccacgtgccgctgaccttctccgaccaggaacgcctggcgcagcgcgactttgaaaccctgaccgcgcaggaatggcgcgcgctgcagcacctggtgcgcacgcgccgcgcccacctggccttgcagcgcacccgccgcctgcgcgccgccacttgtggcacccatgccgacctgcgcgccagcgcgcgcctggcggtgcgccagcatggcgagtggctgcgctggaaattccgcaagcacgccgagcgcaagccgccggtggtgctgctgctcgacatctccggctcgatgagccagtactcgcgcgcggtgctgtacttctgccatgcgctgatgcagtcgcgcgagcggctgtcggtattcctgttcggcacgcggctgaccaacatcacgcgctcgctgcgcgaacgcgaccccgacgaggccgtcgcgctgatcaccggccaggtgcgcgactgggccggcggcacccgcatcggcgcggcgctggccagcttcaaccgccattgggcgcggcgcacgctgtccgggcgcgccaccgtactgctggtcaccgacggcctggaccacgagcatatcgacctgctcggcgacgaaatggcacggctgcgccgctttgcgcaccgcatcgtctggctcaacccgctgctgcgctaccccggcttcaccccgcaggcgcgtggcgtgcaagccatcctgccgcacgtggacgcactgcgcccggcccataacctggacagcctgctggcgctcgagacgctgctgtccgaccatggcggcccgccccgggccgccacccctgccctcgccaggcacaacaaggaagccccgccatggaaatgaaccagagccagcgcctgccggtcccgcagcaggtggcatgggaagcgctcaacgacaccgagctgctcaagcactgcatcccgggatgtgagagtatcgagcccgacggcgacaacgcgtaccagctggccctgacggccgcggtgggcccggtcaaggcgcgcttcaagggccgcatggcactggaagacatccaggcccccgacagctacaccatccgtttcgatggccagggtggcgcggcgggattcggcaagggcagcgcccaggtccggctggaagcagacggtgacgagaccgtgctgacctacaccgtcaacgcccacgtggggggcaagatcgcacagatcggctcgcggctggtggacgccgcggcgcgcaagatggcagacaccttctttgcgcgcttcaccgaggccgtcacccctgacgccaccgacgaaacgccagcggccgagagcgcccccgccgcggccgccggcgacaatgaaccaacagaggaaccgaagcggaaacgatcatggacagcgtggatctcgaagtcctgaagaacagcgtgcagtggcagcagcaaggccatcgcgtgctgctggtcacggtagtgcggacctggggctcgtcgccccggcccgaaggcgcgatgctggccgtgcgcgacgacggcctggtggtgggctcggtctcgggcggctgcatcgaggacgacatcatcgaccgcgtgcgccggcagggcatcaccgccgaccacccggaagcgatcaagtacggcatcagcgccgaggaagcccaccgcttcgggctgccgtgcggcggcaccatcgagctggtgaccgaaccgctgaccccggccagcggcatcgccgagctgctcgatgccgttgagaacggccgcctggtcgcgcgcacgctcgacatggccaccggcaccgccacgctgggcccggccaacgccaccgacggcctggtgttcgacggcaagaccctgctgaccatccacggcccgcgctaccgcatgctggtgatcggcgccgggcagctgtccaagtacctgtgccagatcgccgtgggcctgggcttccaggtcaccgtgtgcgacccgcgcgaggaatacaccgagacctgggacatccccggcgtgaccatggtgcgcaccatgcccgacgacaccgtcaccgacatgaagctggacgagcgctgcgccgtgatcgcgctcacgcacgaccccaagctggacgacctggcgctgatggaagcgctgcgcacccgcgccttctacgtgggcgcgctgggttcgcgccgcaacaaccaggcgcgccgcgaacggctcaaggaattcgacctgaccgagctgcagctggcgcggctgcatggccccgtgggcatctacatcggcagccgcacgccgcccgagatcgccatctcgatcctggccgaggtgatcgcggccaggaaccacgtatcgctgcccgacatcctgcaggtggaaggcgccaaggccgcacgcgagatggctgccggcaccggcagcagctgcgacgtcgcgcccgatcccacctgacgacctcgcaagtgccgccatgactgccgcccccaacgctcccctgctccgcaccgacctgcccaccggcatcctgctggccgcaggctacggccgccgcttcgacgccgccggcaaacgcaacaagctgctggaggtgctgcccggcggccgctccgtggcctggcgcagcgcccgcacgctggccgcggcgctgccggaatcgatcgccgtcattcgtccgggcaacccggcactggcggaggaactgcgccgcggcggctgccgcgtgctggagtcgcccgacgccgaagccggcatgggcgctgccctgcgtgctgccgtggccgccacgcccgaagcgcgcggctgggtggtggcgctggcggacatgccctggctgccgatggaactgatccgggcggtggcattgacgatcaccgcgccggacaccatcgccgccccttggcgcaacgggcaacgtgggcatccggtgggttttggcgcagcctggcgcgaggaattgctgaagctggatggggatgagggcgcgcgggcgttgctgaaggacaagcctgtgacgcggatcctgaccgaggatgaaggggcgtttcgggatattgatacgcccggggatctgaagtgacccccaccaacctcacccgatcccctccgccagctcgctcgtcttcaccgccatgatgaaatcattccggtgcaagcccttgatcttcttggtccgccacgacaccgtggcatgcccccagccaaagctgatctcgggatgatgcccctgcgtctcggccagttgcccgacgccgttcacgaacgccagcgcctgcgcgaaattgccgaaggtgaaacgccgttcgatccgcgtcgcgctatcgaccagctcccatcccggcgcctgctgcaatagcatctcggcttcagccggcgtcagcggcggcacgccgccacggcaaggcgtgcacgattgcgctgccaggtcttcgctcatggtcatgctccccgaccggaagaacagcccgcgcctcaggccccttcggtctcagtcagtgcgcgcaggaactcgctgctccaccagtgcacatcctgcgcgcggatgcgctccagcaatttctgatgccgctgctggcgctcggccagcggcatgtgcagcgcctgctggatcgcctgcgcggtggcgcgcgtgtcgtacggattgaccagcagcgcctcgcgcagttgctcggcggcgccggcaaagcgcgacagcaccagcacccccgggtcctcggggtcctgcgcggcgatgaactccttggccaccaggttcatgccgtcgcgcagcggcgtcaccagcgccacgcggctggcgcggcacaggccgggcagccgcttgcgcgcggtggtgcggtggatatagcgcaccggcatccagtccagctcaccgaactcgccattgatggagccgctcagctgttccatctcgcggcgcaggtcgacgtaggcatcgaccgactcgcgcgagggcgcggcgatctgcaccagcgttgcgctcgaacggttctctgggtactcggccagcagccggtagaacgccttgagccgctgcggcaggcccttggaatagtcgagccggtcgatgccaagcagcagccggcggcgcgcgtactgcgcgcacatcatctcgtaggtttcctgcgcgtccgctccgcggcccagctccatgaactcgtcgacgtcgatgccgatcgggaaggcctgcgcccgcaccgtgcggtggaaggcgcggtagcggtgctcgcccatcggctcggcctgcgcttcggcctgcacatagcgcgagaagtgctcgacatccgcatggctctggaagccaagcaggtcgtaggcaaacagtgcgcgcatcagccactcgtgctgcgggatggcggccaggatcagcggcggcggcagcggtacatgcaggaagaagccgatcttctgcccgcagccaatcgcgcgcaactctgacgccagcgggatcaggtggtagtcatggatccagatgatgtcgtcgggctgcagcagcggcgccagcttgcgcgcgaacagctggttcacgcgccggtatccgttcaggaaattggagtcaaagtccgcaaggtccagccggtagtggaataccggccacagcacgccgttgctgtagcccaggtaataggcgtcgtggtcctcgcggctcaggtcgacggtggccagcgtcacgttgccggcctgctgcagatgcaggtcgccttcaccgggcgtgccgccctgggcggtttccagcgccttgccgctccacccgaaccacatgccgccggtctggcgcagggcttcggatagcgccacggcgaggccgcccgccgccacgttgcggggatcggcgacccggttggataccgctacaagtcttggcatatgttgttcttggagtcctctgttctggttgccgtgcgcgcaggcggttcagatcaccgtgtcccacggcgccgacagccgcatcgcgccattgatcagcccgaccatcgaatacgtctgcgggaaattgccccacatctcgccggtcaccggatgggtatcctcggacagcagccccagcggattgcgcgaggccagcatcgactcgaaaatctcgcgcgcttcctcgcgccggccgatgcgcgcaagggcatcgatgcgccagaacgtgcagatgttgaacgcggtctcgggcttgccgaaatcgtcgggcgcctcgtagcggcgcatatagggtccgtcgcacagcgatgcctccagcgccttgacggtggcgatgaagcgcggatcgcgcggctcgatgaaattgacttcggccatcagcagcacgctggcatccagctcgcgcccgccgaagctctcggcgaaggcctggcgctcctcgctccaggattcggccagaatgcgctccttcatgcgctcggcatggtcgtgccagtaggcggcacgcgcctgcagctggagcttgtcggcaaccttggccaggcggtcgcaggcggcccagctcatcagcgccgacgacgtatgcacgcgcgcccgcgtgcgcagctcccacatgccggcatcgggcgtgccgaacactttcactgcctgttcgccgacctcttccagccggcggaattcagcggggccgccgcggtgcagcagccggtgatcatggaaggcctgggccgcgcccagcaccacgttgccgtagacatcgtgctggaagtgctcctgcgcctggttgcccacgcgcaccgggcccatgccgcggtagcccggcagatggtcgagcatgctttcaggcagctcgcgctccaggccgatgccgtacagcggctggatatgtccgtcctgcgactgcatcaccacgttggacagccagcgcaggtaatcctccatggtgccgacctcggacaggctgttgagcgcgcgcaccacgaagaaggcgtctcgcagccagcagaagcggtagtcccagttgcggccgctgcccggcgcctcggggatgctggtggtcatcgccgcgacgatggcgccggtctcttcgaacagcgacatcttcagcgtgatggccgcgcggatcaccgcgtcctgccattcgcgcggcaccgccaggcggcggctccacaggcgccagtaggcggtggtctcctgctcgaagtcgcgcgcggtttcttccacgccgtgcgcgagggtctcgtccgggccgaggatgaagttgtacccgcgcgtgaccaggaacggcgtatgcgacagcacatacgccatcggcgcgtcggtggtcatgcgcagggtcatgtcgtcgccgatatagcgcacatggctgctgccgcgcgtcgtctgcggcgccttgcggccccattcgaagcgcggcgccaccaccacgcgcacgcgcggcgcgccgcgcaccgggcggatgcgccggaccagcgtggtcgggcggaaatagcgccccagccggaagaagcgcggcgcaaagtcggtgatctccaggcagttgccgtggatgtccgtcagccgcgtgcgcagcaccgcggtattgggctcgtaccattgccgcgacgactggaagtcctcgatctcgatcgagaaatggccggcgttctcgctcgggtccagcagggcgttgaacaccgggtcgccatcgaagcgcggcaggcacgaccagacaatgcgcgcgcggcagtccaccagcgcagagatggcgcagttgccgatcatgccaagcgacaacgacggaatggcaaagcggctgccgccgtccacggtcttgtgcacgccttcggtcggcggctggcccggttcgctcgggctgctcggattggtcacagcgatacctccctcaggatgtcgttgtgcgccgggccgggcctggctcggcctcattcggcacggcgcgcgggtggccgccggcgccttccagcgcgcgggccgatcggtgcagccagctgcgcagcgcggccggcccgggcacggtgacgctggccacggtctcgcgctggcccaccagcacgcccagcccgccgagcttgcgcacggcggcaaagcccggctcgtcggtcaggtcgtcgccggcaaaaagcggcatgcgctcggcgaacggcgcggatttcatgaatgcggcaatggcgtcgcccttgtcgacgccggccggcttgatctcgaccaccatcttgccgggcagcgcttccagtccgacggcatggcgcagcacctcggtgaccgcggcatcgaccacgccggcaagttcaggcgcctggcggtagtggatggcgacggcgacggacttgcgctccagccgcagcgcgggataggcgcgcaccagcgcttccaggtgggggatcagcagttccaggccgggggcggcggaagtcttggacaccatgccgccgtcggtgcggaattcagcaccatgcacgccggccgccggcagccgcagcggctgcaggaagtggtcgagttcagagatcggccgcccggagatgacggccagcgcgccgtccagacgctggaacagcgtgtgcagcgtgccgaccagttcgggttcgacctgcaccagttccgggcgcggggccaggtcggccagggtgccgtcgaagtcgagaaacagggcggtattagattcgattagcggtagttgtggcatcgcgttacaccgtaacacgtcgttttgaccggcgtccaccggacgccgtcctacatggcgcgcacgcaacctggcctcgacgcaagtccagggccagcgtctgcggcccccgctgcgccctggctcgccgtgcccgcatgagtgcatcgtcatccacacgaagagtgacctccgcgcggcccgggccgcccgtcgcgggcggcgggagcgtcgcccgggccgggtggaagtcgccgccatcctttatcattgacggtttccgccagaatttccgcctttttttgcgccgccccacggcccgccccgagaccatgacccgcacgtccgccgcccgacccgattacctgaagaagatcctgaccgccaaggtctacgacgtggcgcaggagaccgaactgacctacgcgcaccaattgtcggcgcgcaccggcaattcggtctggttcaagcgcgaggacacccagccggtcttctccttcaagctgcgcggcgcatacaacaagatggcctcgctgacgccggaagagctcaggcgcggcgtgatcgccgcctcggccggcaaccacgcgcagggcgtggcgctgtccgcggcgcgcctgcagtgcaaggccatcatcgccatgccggtcaccacgccgcaggtgaagatcgacgccgtgcgcgaacgcggcggccagtgggtggaaatcgtgctgcacggcgagtcctacagcgacgcctacaaccacgccgcggagctggagaagaagcacaagctgaccttcatccatccgttcgacgatcccgaggtcatcgccggccagggcaccatcgccatggagatcctgcgccagcacccgggcccgatccatgccgtgttcgtcgccatcggcggcggcgggctgatctctggcatcgcctcgtacatcaaggcggtgcgccccgagatcaaggtgatcggcgtgcagacggtggactctgacgcgatgaagcgctcggtcgacgccggcaagcgcgtcgagctgaaggaagtggggctgttctcggacggcaccgcggtcaagctggtcggcaaggagaccttccgcatcacgcgcgagctggtcgacgacatcatcctggtggataccgacgccatctgcgcgggcctgaaggacgtgttccaggacacccgcagcatcctggagccggccggcgcgctggccgtggcaggcctgaaggcctatgccgagcgcgagaagctcaagggccagcacctggtggcgatcgcctgcggcgccaacatgaacttcgaccgcctgcgctttgtcgccgagcgcgccgaggtgggcgaggcgcgcgaagccgtgttcgccgtgaccatcccggaagagcgcggcagtttcaagcgcttctgcgagctggtgggcacgcgcagcgtgaccgagttcaactaccgcatcgcggataccagcatggcgcatatcttcgttggcgtgcagatcgccagccgcgccgagaatgacaagatcgcggccagcttccgcaagcacggcttcgacacgctggacctgtccaacgacgagctggccaagcagcatatccgctacatggtgggcgggcgctcggcgctggcgcatgacgagttgctgtaccgcttcgagttccccgagcggccgggcgcgctgatgcggttcctgtccagcatgagcccgaactggaatatcagcctgttccactaccgcaaccagggcgcggatacctccaacatcctcgtcggcatccaggtgccgaagaacgagaagcgcgccttccgcgccttcctttcgacgctgggttacgtacactgggacgagaccgacaacccggtgtacaagctgttcctgtcctgacacctgctgagcgccccatgagcctccctgaacattcgccgctgggcaagccctcggcctacaagaccgaatacgacgcctcgctgctgttcccgatcccgcgccagcccaagcgcaccgagatcggcctgcccgaaggcaagccggtgccattcttcggcgtcgatatctggaatgcgtacgagctgtcgtggctgaacctgaagggcaagccgcaggtggcgctggccagcttcatcatcccgtcggacacgcccaatatcatcgagtccaagtcgttcaagctgtacctgaactcgttcaaccagaccaggattgcttcacccgaggcgctgcagcagctgctgcaccacgacctgtccgaagccaccggcggcaccgtgcaggtgcggctggtgactgaagcggacctgggcaagcagaagatgggcgagctcgatggcctgctgctggaccggctcgacatcgaggtggaccgctatgagcccgcgcccgagctgctctctgccgaccagcaagaatcgccggtggaggaaacgctggtgtcgcatttgctgaagtccaactgcctggtcaccggccagccggactggggcagcgtgcagatccgctacgtgggtgcgccgatcaaccaggaagggttgctcaagtacctgatctcgttccgcaaccacaacgagttccacgagcagtgcgtggagcggatcttcatggacgtgatgcgcgagtgcaagccggtcaagctggcggtgtatgcgcgctacacgcgccgcggcgggctcgatatcaacccgttccgcaccaacttcaatacggcatggccggataacaagcgcaacgcgcggcaatgaggcaggcggggaggatcagaactccccgtgcaggcgcaccccgtagaacttcgccggcccgcggtcgcggttgtagccggggttgcgcacgtactggaagtccgggctgatgctcaggtacttcaccggctggaagctgtagtagatctccaggatctgctcgggcccgtagcgcagcgcaccgtcgcccaggaaggcgccctgcccacccgcggccaggtagttgcggtggtctgggcccagcatgttgatcgccaccgccacgcccagcgcatcgcgcgcccgtccccacgcatcgcccttcagcacgccgcccgccgacacctggcggccgatctccgtgaaggcgtaggtctcggtcttgtcgtcggacaggctggcgcgcgcgaacatccccagtgaatcggtgacctgctgcagcagtgtcacgcccacgccgctcttggcgtgctcgcggcgcacgtcggcgacgtccggggtggtgttgttggccatgccgaagccgatggcatcgctgaacgcgcccatgcgcgccttgttgcggaaccacagcagccgcgcggtgccgggccggccagccagctggtagcgcttctccacttcgatgatgtcgccgtagtgctcgaacatgcgggtgtcgagccgcagcccgttggattccagcggctgcaggaagcgcccgatgcgcgccgaccagccgtcgccgatgtattccagcgacaggccccagctatagccgcgtgcatcggccggatagtcgaaggcgccatgcgtcatgaacgaccagttcatgaattgcgtgcgcgggtccgagccgaactcgttctggtcgaagacatccagcacgctgaagttgcccgctgtcagcaccacgcgctgctgatcgacggtgcgcccaaactggttgaaatccgcttccagcgcttcgctgccgccgcccaggccccaggtctgccgcacgaacgcgcgcgcccggtagaacaccgggttggtgctggcggccttgcccagttctccgttggacaagccgcccaggccgtgcaggccggaaaacggcacgccttgcgtggcttccggattgaagtggaactccgcgcctggccacagcttcagtcccagatccagcgtcgcactgaacgagtagctcttggcccgttcggtacccaggctgttggggccggagtaggccgcgccgaatgctggcttgcgctgccagatgtaggtgctctggccgtgaaaggcaaacgggctctccgcttcagccgggccttgcaccggctccgcttgctgcgccatcgctggcaggcacgcacaacaggccagcgctgccagcacacgacgaaaacggatacgaacgggagcgctggcaagtggcggaaacggcatcggcagaggcgatcggcaagggatgtgccggaggcggcgcgctccggcgcccgcagcatagccaagcacccatgacatgtctacctgccaaagggtgtgccggaaagccgacgttgtaaccgcccttgaattaattaacgcaaaaattaatattcactgaagaccgcttgcatccatgcgcccatgccgcgcccacccgccaaaccgaaaccctccgcccgccgcagccccggtcgccctgcggccggccagcccggccagcgcgaacgcatcctcgatgcggccaccgagctgttctcgcgccagggcgtggccggcaccccggtcaaggcgattgccacccaggccggcgtgacgccggcgctggtccattactacttcagcgaccgcgaattgctgctggacgccgtggtcgaggaaaagctgcagccgctggtggccggcgtcttcgctgccgccggcgatgccgagccgatggccatgctgatcggcatcgccggccagctgatccgcaccgcggccgccacgccctggttccccgggctgtggatccgcgaagtcgccagcgccgaaggcgccctgcgcgagcgcgtgctggaccgcttcgcgctgcagcgcgccggcgcactgagcgcgccgctggcggccgcgatcgcgcgcgggcagctcaacagcggcctggagccggcgctggtgatgccgtcgctgatcggcctgacgctgctgccgctggccaccacccatatctggcgccggctgcccggcggcgaagcggtcgataccgacaccctggtgcgccacgtatccgcgctgctgacgcacgggctggcaccggcgcccgatgccggcaagtccaggctttctccggagtcatcatgaagcacgcccaccccacccgcccgcaactgccggcagcggcgcttgccacgctggcggcggtgctgctgctcgccgcttgcagccgtgaacgcgccgacacctggcaaggctatgtcgaaggcgaattcgtcagcgtggcctcgccgttcgccgggcgcctcgacacgctgtcggtgcagcgcggccagcaggtcggccagggcgccgcgctgtttgcactcgaatccgacgacgagcgcgccgcgcgccagcaggccgaagaccagctgcgcgcagccgaggcacagctgcaagacatgaagaccggcaagcgcccggtcgaagtcgaggtcagccgcgcccagctggcgcaggcacaggcccaggcgcagcgcagtgccgcggccttgcggcgcgaccagcgccagtatgagatcggcggcatcgcgcaggcgcagctggacgaatcgcgcgcacaggccggcagcgacgccgcccgcgtgcgcgaactgcagcgcgatatcgacgtggcccggctgccgggccgcgatgcgcagcaagccgcgcaggccgcgcaggtggcggccgcgcgcgcggcgctggcgcaggccgagtggaagctgtcgcgcaagaccgtggccacgacccaggcggggctggtctacgacacgccctaccgcctcggcgagtgggtgccggcgggcagccccgtggtgcgcatgctgccgccgggcaacgtcaaggtgcgcttctatgtgccggagacggtggtgggcgcgctgcgcaacggccaggcggtgcaggtgcgctgcgacggctgcgccgcgccggtggccgccaccatcagctacgtcgccaacgaggccgaatacacgccgccggtgatctacagcaacgagacgcggcgcaagctggtgttcctggtcgaagcgcgcccggcggcggccgatgcgcccaagctgcggccgggccagcccgtcgaggtggtgcggcaatgaacaccagagcgaacggcggcgcggccgcactcgccatcgacgtgcgcggcctgaacaagcacttcggcgacaagcacgtggtcaacgacctcagcatgcaggtcgcgcgcggcgagatcttcggcttcctcggccccaacggcagcggcaagaccacctcgatccgcatgatgtgcgggctgctgacgcccgattccggcgagggcacctgcctgggctacgacatccgcagcgagtccgacgagatcaagcgccgcgtcggctacatgacgcagaagttctcttactgggacgacctgtcgatccgcgagaacctggacttcgtcgcgcgcgtctacggcatgccgaaccggcgcgaggcggtcgaccgcgcgctggaagacctgggcctggccacgcgctcggcgcagctggccggcgcgctgtctggcggctggaagcagcggctggcgctggcggcgtgcctgctgcacgagcccgagctgctgctgctcgacgaacccaccgcgggcgtggaccccaaggcccggcgcgacttctgggagcagctgcaccagctggccgcgcgcggcatctcggtgctggtcagcacgcactacatggacgaggccgagcgctgtcacaagctggcctatatcgcctacggcaagctgctggcgcagggcaccgccgatgaagtggtggccagccagaagctgtcgacctggagcgtggaaggcgacgacctcgccgcgctgtccgagcagctgcagggtgcgccgggcgtggagcagaccgtggccttcggcaccgcgctgcatgtgaccgggcgcgatgcgcaggcgctggccgatacgcttgcgcggctggccggaccgggccggcgcgtcgagcaaacccagaccagcctggaagacgtgttcatccacatgatgagcggggccgaagacaatatggcagcccgcaaggccagggaggcgtcatgacagccgccgcccgcaacccggccgcgcaacagcgcttctcgttgcaacgctggtggagcatcgtgctcaaggaattcctgcagctgcggcgcgaccgcgtcaccttcggcatgatcatcgggctgccgatcatgcagctgctgctgttcggctttgccatcaacaccgatccgcgccacctgccgaccgcggtgattgccgccgaccagagcgaattcacgcgttccttcatcgccagcatggagcaatcgacgtatttcaagctggtcggcacgctgccggacgaacaggccgggcgcgaggcgctgatgaagggcgaggtgcagttcgtgctgaccatcccgcccgacttcacgcgccgtctgctgcgcggcgaacggcccgcgctgctggtcgaggccgatgccaccgatccctccgccaccggccaggccatcgccgcgctaccgcagctgccctaccgcgtggccacgcatgacctgaagggatcgctggcgccgctggccggcggcaagccgcccttcgacgtgcaggtgcagcggctctacaacccggaaggcatcacgcaatacaacatcattcccggcctgatgggcgtgatcctgacgatgaccatggtgatgatgaccggcctggccatgacgcgcgaacgcgagcgcggcaccatggagaacctgctggccacgccggtgcggccgctcgaggtgatgaccggcaagatcgtgccctatatcttcatcggcctgatccaggcgaccatcgtgctgctggccgcgcgctggatcttcagcgtgccgttcgtcggctcggtgctggcggtgtacctggcggcgctgctgtttatcgcggccaacctgacggtgggcatcacgctgtcgtcgctggcgcagaaccagctgcaggcgatgcagctgacgttcttctacttcctgcccaacatcctgctgtccggcttcatgttcccgttcgccggcatgccgggctgggcgcaggccatcggcaacatcctgccgatgacctatttccaccgcatggtgcgcggcatcctgctcaagggcaacggctgggtcgagctatggcccaatgtgtggccgatggcgctgttcatcgtggtggtgatggcaatttcggtgcgcttctaccgccgcacgctggactgaaggggttggccatgcaacgactcacgcctctgtttgccgccgcggcactgttgtgcggctgcgccgtcggccccgacttccgcgcgcccgcgccgcccgatgacgccggctacgtgccgggaccgcagccggtggcaaccgtcgcggccgacagcgccgacgccgccgggcaatcccacgcgcaaaccctggccgccggcgctgacgtgcccgcgcagtggtggacgctgttccgcagcccggcgctggacgccaccatccgcagcgcgctggataccagcccgacgctggcgcaggcgcgcgcccggctgcgcgaggcgcaggagaacctggccgcgcgcaccggcgcgacgcgctggcccgccgtcgacgcaaaactgaacaccacgcgccagcaggtcgacttccagtccctgggcatcaccgcgatccccagcccgggcccgttcacgctttacggcgccacggtgcaggtgtcgtacgtgctcgacctgttcggcggccagcggcgcgaactggaaggactgcaggcagcggtggactaccagcgctatgaactggaagccgcgcgcctggcgctggccgccaacgtggccaccgcggccatccgcgaagccggcctgcgcgcgcaactggccgataccgccgccgtggcggcggcccagcagcgccagcttggcatcacagaggaacgcctgcgctcgggcggcgtcgcgcgcgtcgacgtgcagcgccagcgcgcggagcttgcgcaagcccaggccctggtgccggccctgcagcgccagctcgatgccacgcggcaccagctcgcggtgtacacgggccagaccccggcctcggccacgctgcccgaattccgcctcgacgacctgcacctgcccgacacgctgccggtcagcctgccggccacgctggcacgccgccgtcccgacatccgcgcggccgaggccctgctgcaccaggcctcggccaatatcggcgtggccaccgccaacctctatccgcagatcacgctgagcgccagcggcggcacgcaggccaccgcggcgcgcgacctgttcagcagcctgaacgtatggagcctggccgcggggctggtgcagcctgtattccgcggcggcgagctgcaggcacgcaaacgcgcggcggaggcggcttatgagcagtcgctggccgcgtatcgccaagccgtgctgcagggcctgcagaacgtggccgattcgctgcgcgcactcgaaaccgatgccgccgcgctgcgcgaacgcgccgacagcgcgcggcaggcgcgcgatacgctggcggtggtgtcggagcagtaccagctcggcggcgtcagccagctgacggtgctggatgccgaacggcagtcgcgccaggcgtcgctggaactggcgcaggcgcgcgccgaccggctggcggattcggccgcgctgctgcaggcgttggggggtgggtggtgggaggaggaaggcggcgctgtggcggcagcaccgcggtgatggcggctggctaggtcttgtcgctctgcgtgtgccagtaggtgcgcttgcgcttgccggtgctggcgggcttcacctcctggccgcccagcgatgacttgtcgtcgccgcccgaggcaccagccttgccgcccccgatcagcaccgggaccagccgggtcgatccgtcggtctgcgtgaccgacaccatgccgaacacgggcgacggcggcagcccgccgttgtcgaacctgacaaaccgcggcccgttgttcatgccaagcccgctcaggaatgacaccgcgtagccccgcgcaacgcccaggtcggggtagcaggctccgggctcgaccttggaaggcgtgttggtgccgaagtacgtgtagcccgccacggtcagcggcgcattgaccgccttctcgccgaattccagcgacaagtagaagccgctagccaccgccgaatcgcggtaggccacgttggtcgcatcgacaagatcggccgccttgaccgccgtccaggtcgaaggcagcctcccatcgacgttcgggtctttgaccatgaagaagcggttctgcacgttctgcgccgcgccaggggtctggctcagcgagtacagcggcttttcgcggtcgcccgaggcgatcatcaccgcgtcgtacttgccggtcgcgacgacatcgggcggatagagaaacttgcgcgcctcgttggtgtccactgcgccgcccaattgcgcgagcttgccgaccgtccacgtcgacggagtatccgtatccgtcgatccgaagtcgatacgccagacattgccgccgacgtcgccgacataagccttttcggcatagccatcaccattgcggtccaccacggcaacgtcggaaggaatcgcgcggctgttgatggtgacgcaggtgcccgtgctgatgccagcgcaattggccagggctgcccagaccacgtcgcccgtcccggcgtcgagcacgatcacgccgcggccttgcttgttcgtcgccgtggcgatgccattgagcgctgggtcggtatcctcgccatcggggtcgtagcccgcacccatgatcagcacaggcgtcgggtagccgcgcacgcgcatcacccgcggctgcgaccaggtctgccccagttcagggatgtcggcgttggtcttgctccaaaggtactccggctttgccggatccttgacgtccaatgcataaatcaggcgaccgccgcgccgtgctgtcaggtagatctttacctggggcgtggccggggtgctcaggtcctggtagaccgtcgtggtgccgtcgaagaaatagtcgcgtggaacaaactggacctcggcggtgtcctgggggctgcccgtcagccgcacctcgggagcgttgctatagatccgcgccagcttgccgtagaactcgggagcgatgaagccccacagttcaccgcccgcgcgcaccgtgcccgcggtggtggaaatggctgcagtgcggttaccgttgacggcatggaacacaccgtcattggcaccgtagaaaaccactacgccagtggtgccgccgtagtcgaccaccaccgggcgcgaatgcagcacgtcgccgtggatcgagccgcgcaccgtgacgttgccgccggggccgggctccgcctctttcttggggtcggtgccggtcagcgtggcgaagacgtccttgccgcgcacccagctgatcatattggccacatccgcggcagtggtcttcagcagcgacggaccgttgccctcggtgagggccttgttggcggtatcgaaattcgccagcgcggtccccttgctgcatttcgcgtcggcgcaggtcagcagccggcgcccggcctgactggtcaggtagtctgcgcgcagcatttctcctgcgccgcccttctcgacgacctcgccgtcgggtgaatccttggcattgcgcagcagcgacgaggcattcttccagaacccgtccgagggccagtccgtcacgatactggagctgcccaccgccttcggcggatcctcggtccagtagctgcgggcattgggcgatataaacccggtccccgcgttgctaaccgcattcttcgggggctggtcgatcgcgccttgcaccccggcgtcgagcatcaccagattgccgttgctgtcatagcccagcttgtactgtttgaggttgcccacccagcgcggacgggccttaccgtccgggcggaacatgccgatatagacctggttcaggtacgaaccctgcccgttcacgctgaccggcaggctgaccgaggcaaatacgttgttgaccgcctgcatctcgttgaaaatgtccttcagcgccttcgaaagcgcgtcgtcatctccggcccggactgtaaagttgccgcccccgcccttctgggccatgctggtgacgaactgcaggtagtcctggctttgctggctgccgtcagtgacgccgatggtgtaggtaatgatgttctggcgcgtcgccgtggtcgagcccgcgttgttggcggcgttcaggtccaggtcgttcaggaagcgcgcccactcatcgccccagttgtcgatgttgttgcccttgggcagcgggatcggagtgagctgcgcggtggtggcgcccgcctccttgagcttgttgtaggcatcctggccggagtcctgcggcttgccgttgttgagcgcgttggcaatgtagatgatgaagttcttctggcacgggttggtgatcggcgacttgtatgtggtgccggacaatcccgtcttgccggagaagaaggcccatgcctcctgcatggcgccgccgacctgcgagttgttggcactgtccttggtacggtcgatggtcttgatgtagtcgagcatgtcctgtccgcccgcacctttctccatcagcaccagcccggacggcgcggtgggcggcgtcaccttcgggaagcggaactggccacccgtattggtgccctgcccgaacatcatcacgccaaggttgatcttgccgttcgtcttgtcatcattgatcaggtccgacaccgccttgtatagtgcgcactgctctgcgccgacgttgctgttatcgttgttggcgctcaccacgttctgcatttcgcaatcgacctgggcattggcattccacgccgatgcgttgtcgagtatcagcagcacgttgggacgcgacccggagttggcctgcaggccggtgaacaggtcgatgtcttcggctatcgccgcgggcgcggcagccagcccgagcagggctgtggcacaggcagcggaagcgcgaagccggcgagcgggcatggacatgctggttcttcctttcaagatccggatctggcccgagacttcaggggcaagtggagccatacagcgtgcgcaccgcaacgccctggtgcaccgtcgcgacggcgccggttgtattgacgtcattgacggtggctgctacatcccactgcgtatcgttgcaaagcgaactgatcgcactgacaccgcttgcgcccatgaccaggttgccattgccggtgctgctgcccagcgtgcattcggcatcctccgggtgcttttccggatcgatcaccttggccactggcttgctggtcacgcaggtcggtgccgccacctgcgcgatgtaatccgccttgccgtcacccgtcacgtccaccggcacatccaccgcaaccggcgccttggtgaagtcgtcgctgatcacctgctcgatcgcctgctgcgccacgtcgcgtgcttcggcgctgtgctgctggttgcccgccaccttgacgttgaccagccccgaattgaccatggccacggcgaccagcaggaacagcaccatgaacaccagcgtcaccaccagcgtgaccccgaattgcctgcggcgcagcggcctgcccgttgacttcatcattgctcgctcttcgctgtgttgaatcggtatggcgttattgctcgcgcagcccggccacattgaccagccgcgccacctgggcgtagacgtggcgcttgtagccgtcattgaacgggcctgcggccgccgcgcggccgaggtcataggtgcggttgtctgaatgcccgcccgagggcttcagcgtgcgcgccagcaggtgcacgcgcaccgtggtgacattggccaggttgttgagcaccacgccccagtcatagccgggaacggcggtgcagacggcgctgttgttcgcgcggggatcggacacgtagcagtcggccgagccgttgctgtcctggtcgacaccgtacagcacatgcatgtcttgcaccccctgcgcgaccgagcgcgactggaacgcaccgttgaccagttcggccatcttcagcgtggggatgccgtcgccgccgttgctgcagcggtcgcagccggccaggtagaagatgcgcaccatggcgcggcgcagttcagccggctgggccggatcgcaggccttggtgcgcagcccgaaggccgccgcgccgctggcatcgaagacaaaggtctgcgtgtcctgcgaacaggccgatacctgcaggtagggcacgcccggtgccggggcggcaaccgccgtggtcgacacgcgccgaatcaccagcacctcggaagtcggcgccaggtccggcaggcatggtgccgccacgcccggcgcatagccggtcagcgccaccggcacggtttcggcagcaggcgagaagccaagggcggctgcatccgtcgcgcacagcgccggatccgcggccttggtgctgcgtgcaatgttgccgacgccgaagaaccccgccagctccacttcgcgccggatctgctccagcgcgtagcggccgttctcgacctgctcggcagacttggtgaattcggtgcgcgacaggctgttggcaaggtacaggctcgccagcgcggtcagcagcaccaggccgatggtgatgccgatcatcagctcgaccagcgagatgccgcgctggcggcgcaggcggcgcgcggacaggcgcagggggctcatgacacggttcccagggtgccgatgcggatctgcgtgctgaccgcgcggcgataggcatcgttgccgtactggcccttgccgcagcccagcgcgggcgcgccggtggtggccaggccctgccaggccacggtgatgcggtagatattgttgacggcgtcgacggtctcgatgcagccgcgcgcgccgatcatggcgccgacggcctgggcggcatcagcggcgctggcccccaggcgcatctcggcactacccagcagcgcggtgttccaggcctgcaggtccgcatcggcggtagccttctgcgcggcggtgccctgcgtgcacgccgccggcggcgccgccgcgctgcccagctgcatgccggtcgcgccgttggcatagcacgatgccacctggcggttggcgttgaggcgcgcaaccatgtcctgcagcagcgccagcgcctgcacgcgctggtaggactccatctcggtctggcccgagcgcgccaccagcccggcggtgccgagcagcgcgaccagcaggatcactgccgccaccagcacctcgatcagcaggaagccgcgctgcgtgcggcggacaggcatgctcggccgcagccgcggaattctttgcttcatgagcaggctcccgtgtcggaagcgacgcggcctgtctcgctgacctgcacgcagacgcgcgacgccgctgccgtatcgccgttgggcgccacttcgaaagtcatggccgcgcccgtgaggcggccgtcgttgccaagcgcaagggccccggcagcgctgggcgtgatggtcaggccgccgtagggcccgaagctgcgcaccgtctcggcgcctgcggtgactgcccaaccggcagtccatgcggcgccggtggctgccagcgtgaccgtggcattgcgcttgactgcctcgctgcgcgccagcagcagcgccgaggtcaggtcaagcgaggcgccgcgcacgcgctggttggcgatcagtgaagagaacgacggcgccgccgcgaccgcgaggatcgccagcaccgacatggcgcacagcagttcgaccagggtgaagccgcggcgggtgggccggccgggcgaagacggcgggaacgtggcgcgccgcatggtcagttccagcagtcggtgcctgaaccagacgccgatttcgcgccggcactggtcagcgtcagcgagccgcagtcggcgtcgccggcgagctggctgcccttgggcgtggccacgatgctgtagccgggcggcagcgccgcgttcggcgtcacggcgacgtcgtagcgcgttgcctgcgcggccggcaccgacatgcccagcgcgcccagattggcggcataggcgcggttgtcgaccaggtagcgctcctgggcgctcgcgacctccagcatgaaggactcgatcgcggcccggtgcgagcgcacgacgtgacggctgtaatttggaatggcgacggcggcaagaatggcaatgaccgccacggtgatcatcacctcgatcagcgtgaagccatgcgctgccctggcgccgcgcaggcgccagccccggcacggattgccggttgccccaacttccccaatgacccgaaacgacgggttgaccctcccgccgtgtcgcactgccgggcttctatgtcccatgccgcgctccgataccaattatgttccggatgaccaattccggaggttatggcgcggagtgtaagtcacgatctgctaagcgggtaaggaaaatatgatgccggccgaccggcgttgtagcgaacagacagtgatgttacgagacctgctcaggacatacagccaaggcatatgcagacgttaaccgtcagtgagggggaaccctgacccgccctgttcgaccggcccgatgcgcgcgcgggcgcacctgtgcaacaatcgttacaaacaccgaatccggaatgcccatgccgcccgacagccctaccccatcgccgcaagcgccgccgcaggacctggacgccctgctggcgctgctgcgcagcaacttccccacgctcagcacgcagttccagggcggcgcgcgctacctgctcgaccatccgcaggacgtgccggtgctgtcgatgcgcaagatcgcggccagtgccggggtgcagcctgccaccctggtgcggctgtcgcagcatctcggcttcgagggctggcaggggctgcgtgaactgttcgtcgatgcgctgcgcggcggcagccagccgtacgcgcgccgcgcgcgcaaggtggtgcgtgaaagcagctccagccgcatgctgggcgagattctggacgcgcagcaccacaacctggacatgatcgccgccaacaacgagaagacgctgcagcaagcggcggaactgctgtcgcatgcggcgtgcgtgcatgtggcgggtttccgctcgtgctttccgatcgcgttcaccttccactatgtctaccggctgttccgcagcacggtgcacctgatccgcgccgatgccggcacgctggagatggagctgcgtggcctggcgcccaaggatgcggtgctggtggtcagcttcgccccctactcgcaggaaagcatccgcgtcgccgccgccgcgcgcgagtgcggctgcaaggtgatcgcgctgaccgacagcacggtcgcgccgatcgcgctggcggcggactgcacgttgctgttctcggtggaaagcccgtcgttcttcccatcagtcaccgccggcgtggccgtggtcgaggccctggtcgagcagctgctggcgcgcaagggcaagggcgcgatccgcgcgctggaacaagccgagggcgagctgcaccggaccggggcgtatgtggtggcggggcgcgagtgagggtggcccccagtcactcatcactactgcgtgcacttctcccggtacgcctgctgcagcgacctcttcggccggtcacgctccagttccggaatcatgcggccctgcgcggtctcgatggccggctgggtggcacggtattcgcgcttgggtgcttcggcgatctgcgcggccagggcgcggcattcgtccgactggatgctgcccggcgtcgcggccgggtcgggacggtagggcgtggtgccctgctgcaccgcttcgttgatggcggcggcggcagcgctgtccccgtccggcctctgcgcatgcgcgctgcaggccatcgccagggcggcgatggcggaaatgcgggtcagggttcgctggctcggcatgacttctctcctgtggctcgatgaaattatgcaaaggctgccagcttaatcgttcgcggcctgtctgacactaccggcatttccggcatttgcggcgtcgatgccacctgcgcctgcctgggtacaggctgatatagatgccctcgggcgattccagcgctgcatggccggtggagatcacgccgtcgcggtccaccgcggcgatatagcggtcgaccagcggctggcggcgcgcttcgccgcgggcggacccgaccggggtccagacatgcacggtcagcgcgtgctcgccgggtccgggcggaccgtcccagatggtcatgtcgggcgcatcggcggcagcagccgtatcggttgccggaccggcggcgggagcggcccgtggttgggccacaggacaatacggccaacagcaagctgtggcgcggagattccgctagggcgcgcgacgcccgcctccttcgtcccgctcgagctcccagtcgcggcgcatcatgacataggtgaacgaggtggaccagccgatcaggatcaggccgaccagcggctcgatgctggcgatcaggcggctggcgcccaccgggacgatgtcgcccaggctctgcgtggtgaaggtctccagcgcaaagtaggcgtagaccagcgcgcctggctgcgtgtggacgccggacacgccggcaacgcccatcgcggtcagtccgcccaggcccagcacctggtcggcgaaccagaaacccagcgcgaacaccagcgcttccaggcaatggaccacgatgatgcagacgatcagcacgccgatgttcatgcgcccgctccagcgccgggggtgtatcgctgacagcagccgcagtgcctcgtagtggatgccgaccacggtcacggtcaggacggcggcgcacagcagggccagcgaatagtgttcggcggaagtttccatgcgcagcggcaggcctggtcggtgtccgggacgatcgggaacagcgcggaaaaaaaagccgccctccaaaatatcactggaaggcgtgcaggaaaaccagggagcgggcgcggcgggcgcgcggccgtgctcgtagccctggcagagggtcggtggcggccgggtggccgccgcatggatcagctgctgctcttgcaggagaggttgacgtacagcccgccgccccatttgaagttgcggttgccactgacctgcacctggacaatgtcgttggccgccaccgccgtcgtggccggcgccgagcaggtccgcacggtggcgccgagcgaacaggcggacgcatcggtgatggcaagcggggcgatcgtttccagcgccgcgccgctggcgacacggtatgccgccagggtgtacttgacctcgtcatcgggcaccgggcccgccaggctcgcgttcagggtcaggccgccgctgcagcccaccggcatcacagcgccgaaattcggatcgttgctttgccggtccagcgcggtgccggtcatgacataggtgccattgccatccggcgagtcgtacacagcgaagttggcggtatagatcgtcgcgccggcgcctgtctctccttgctggccctgggggccggtgtcgcccttttcgcccttctcgccctgcggaccttgcgccccgaccgggccagtcaggccaaccacggagaccccggccggccagccctcggccgtcttcgggccgaacagcgtattggtggccgtattgaggtagaagctgcctttgctgccatcggcagcggtgggatctgccgcgccgtgcagcagcacggcgccgggcgccccggccacgccttgcgggccgaccagcgacacgccggcaggccaggccccgtcagccttgggtccgtagagcgtcgaggtcgaggcattgaggtagaagtcgccgtccgtgccaacgtccgccgcgggcgcattggcgccggacaggatggtcttgccgttcgcgccggccgggccggccgcgctggcggatggcgcggcgctggctggcgcggaatcgccgccaccgccaccgcatcctgcgagcaggatagcgaggcaggcgagcgggatcgccgcgagtttcaggtcaatgcgttgcacgatggaagccccccggtttctcatgaatggcatgcccggatctgtgccgagtgagttcaatctagagatcgcggtgattccggtaaatcgtgcatttgcacgggctgtttcattaatgaagcgcgtttccggagccgcgaaaaactgccccgccctaatagcgtcaacgcccgtttgaaatcccggatgactcgggataataattatgaaaatacccggattgccgcacctggcggtaacacggcgggcatctggcccgattcagagcgggcgaattcaagcaccacacgaccgcatccgtgcgcgccggtgcggccagaaaataccggcaatatctcacccgaacggttgagttgcggatgggatagcgtggctccgggctgttaaaaggagaaacgaataatcgccatttaccccttcgtgggggaatatgcgcggcaccggcaaacggccatgcgcagcatggcgcggcgatggactatgctggaaatcccaacagcgtcctcgcggaggccatcgtgcgcaaatctgtcctagtccttacggcactgctgctggccagcgcccccggcctggcgctggcccataactgccccaacgagatgaaggccatcgacgccaaactgtcgaccaagccggcgctgtcgccggaaaattccgccaaggttgccaagctgcgcgccgacggcgaggcctatcacaaggccggcaagcatgacgaatcgatgaaatcgctgctcgaagcgaaaaagatcctgggtatctgagaccgatcgcaaagaagagccgccacgcgcccaggcgtggcggctttgtttatttttcccgcggtcgtcgccgcagcaggccgggtcaggaccccgatccaacctgctggaccacaccgttgggcgccaccaggtaatattccgcgccaatcccgacccagcgcgtgcccttgcgcggcgcgggcaggttgtattgcttgtagtcgtcgatcacatactggcggtccctgaactcggtgggcagccggtcacccttcttccactgctgcacctgcatataaggcgagttctgcgccgccggcgcggaggcggccatgggatctgccatcggcttggacttggcaccaccctgcgccatcgcaaacggcgccgccagcacgcttgccgccagcaacagtgccggcatcgctttcttggtcttcatcgtgatctccttgcgtacgggaaaaccgaactgccggaggatccggacagcatctaccagattagtcacaaatgcggacaactgcggcatccgccgtccatgcgctggcgctcgatttgaccgacggggcattcgcgccctgacagattgttcacaattgtttgccggttggcacccattgggggggagccgccgacgccacccgtgactagaatgggtcctgacagaaacaatttgttacgggcggccgccactcagctgtcagcgggccgcggccccgcgacccgcgccgcgggcgcgtaccgccctcgatgttccctggcttacgccctgttcacggcgcttcgcacgcgggcacccgtccctgccagagaaccataaaaactggggactctccgtgttgcacgatactggtcaattcctggccctggtcaatcccgccatggccatcctgctttcgctctgcttcctgctggcctggaaccatgagcgcacgcggcactacctgctggagctaggtgcctgctatttgctgtacgcggttgccatcaccttgcagatcatctggcagccgcgcaacgacggcggcaacgccaccgtcaccggtgcgctctacctgggcagcgccgtgctgatgctgcgtggcatgctggcgcgcatcggcgcgcgcgtcgatacctgcgcgctggtgtcgctgccgctggccctgtttgctgcgcttgcctggtttgatttcatgcaaccccagctggtcgcccgcatctgcatcctgaatatcggcatcgcgctgatcctgctgctgggcatcgcgccgctggcccgcctgcgcacaggcagcaccgcggaccaggtgctgttctgggtcttcctgctgtttgccctccatttcctgccgcgcacggtgctgaccattgctccggtcatcggacaggacgctgccgccctcacccgctcggcctactggctgtggctgcaggtcaccatggcattgctgctgctcacgctggcgttggcgctgctggcggcgaccacgctggacgtgatcgacggcctgcggcatgaacgcgacaccgatccgctgacgcagctgcacacgcgccgcagcctggaggcgctggccgcgcgggaaattccgccacctcagggcaagccgctgagcgtgctgctgtgcgatctcgatttcttcaagttcatcaacgacaactacggccacagcgccggcgacgcggtgctggcgcaaatcggccggatcatcgccgccggcatccggcggcgcgatatcgccgcgcgcctgggcggcgaggagttcgtcgtgctgttgcccgataccccgcccaatgcagccttgcacctggccgaacgcttgcgccagacgctggagagcacggaaatggacgtcctgccgggcatgcacacggtgaccgccagctttggcgtggccacgctgcggcccggcgaagacctggaagccctgctgatgcgcgcggataacgtgctgtatgcggccaagaacaagggcaggaattgcgtggagtgggaacgggaggccggcttgccggtgctggcatgatgctgccgtgcctcccgtccggcgcggctaagcaaccgtgggcgtgcccaccaccgcaaactccggcccgtcatagctctgcgccacggacacgccgccatcgagcaaccgctggctccagtggtcgagcgccgcgcgcgcggcctggctgacatcgcggcccagggcaaggcggacggccgccggcgcttccagcccgaagctgcgggtggttccccacgcaatttggtcccgttcgaaatccccgatcgcctgctcgacgcacaagccgctgtcggccaccgcggaagccaggaagacatcgggatgcctgctggtccagtcgaccacgttgccgatctggcggatgcccgcggcacggcaggcggcgatggcgccgtcgcggccgccgtcgatcatcgcaaagacgatatctgcgccggcgcgggcctgcgcggcaaccgcgtcgccggccaacgccggatcgtgctggttgccgcagaaggtcgtgagtgccggcaggccaggcactacgctgcgcacgccatggagaaacgccgcgcgccccttcagcccggggcgcaccttttcgcccgacaaatgggcgaccacgccggtgcgcgaatccgtcgccgccagcacgccggcaaggaaggcggactgttcctgcagcacctcatagctcgcggtgttggcgcacagcacgctgccctgcgtgaccacgaagcgccgggcgggatggcgagccgcggcaacagaaacgggatagtccccctgtccgccatgcgcaacgatcaggtccgggccggtctggcacagcgccagcagcgctgctgcgcgcgcctgcggatccggatcggcaatccacgtcaccgccacgtcgtggccggcattgcgtgcgcgcatggcgccggcatgcccggcttcattgaagctgccgcgtccttcgggcccgaacagcactacctggatgcgcgcgctcatgacagcgtcgccccggttgccacgaccacaggaccccaggcctgcgcctgctggcgtacgtaggcggcaaactcatcgggccggcgctcggccagcacaaagccctgggcttccaggcggccgcgcagggccggttgttgcaggatgacctgcagttgttgatgcaagcgttgcacgatgtcctcaggcaggttggccggcgcggagacgccgacgaagttttcggccaccaggccgggatagccggcttgcgccacggtgggcagctggggcgcctgcggcacgcgttgcgccgaggtcaccgccagcaggcgcaaggcgccggactgcagcaacggcaggttctgcggcagggcatccaccgcaaacgggatctgtccgccgagcaggtcggcgcgcatcggacccgcgcccttgtatggcacatgggtcagccgcaaccccgcctgctggccaaacagctcgccgacgatatgcgccaccgacgccgccccgccgctgccgaacggcaccggctcgcgctgcgcgcggatccacgccgccagctccgcgaggttgcgcgccggcaccgacggatgcacggcaaagacggtcggcaccgcgccgatgtaatgcacgtgcgtgaagctgcgtaccgggtcgtaggcgggccgcctgagcaggaacggcgagatgctcagcgccgccgagttcgacatcagcagcgtgtagccgtcattgggcgccgcggcgaccgcagccgcgccaatcgtcgatcccgcccccggccggttgtcggtcacgaatggctgccccagcttttcctgcagcaccggtgccagcagccgcgccacgatgtcgctggacccgcccggcgggaaagtcaccaccagccgcaccggatggcgcggccatgccgcggcgccgctgtccgcgcgcgccggcatccccggcaatgccggcgcggccagcgccgcggcaaggaactgtcttctcgaaatcacggtggccctccggctttacaggcgatggcgcaggccgacgccgccgccgaacttgttgccacgcacgcccatgaaggcgggcagcgcatagctgccgctgatgcggttgaaatcggcttccgcatagacgctggtgcgtctggacaagctgtactccgccacgctggtcagcatcagccggtggccgctggcggcgctctgccggtcatagccggccgccagcgacaccgccagcgcgggcgttgcctgcaccgtggcgccgccggtcagcacatggttgcgggtcgggctcaggtggtagcggttgtccaggtagccgagcgccagcttgacacgccccagctggctgctgccgccgatgccccagatcgtgcgcttctcttcggtggccagcgcattggtgctctggaacagggcaccaatgtcgatccgtgccgtggtccaggccagcgccagcccccggctgctgctggccgccgcatcgcccggcacttcgccgaaggtatagtgcgccgccgccgagaacgcgccccacctgcccgcgtacttcgccatgttgtcttgccgcggaccggtatagccgttaagaatggccaccgcatcgagattgggatggccatagggctggaagcggaaggtcgcgtcataggccgtggtgaactggcgtccgaacgtcagcttcccccacgcctggtgctcgatccccaggtaagactgccggccgaacagccggcctgtaccctgcgtgccaacctgtccgtagttcgacgccgcggtgccttgcagcgaagtacccgaggccaggtcgaagccgctttccaggttgaacagcgccgaccatcccgcacccagcgcctcattgccgcgcgcgccccagcgcgaaccgctgaagtagccctcgctcagttcagccaggcgctcgtccccgcggttgttgtccgagtagcggaccatggtgtcgatcaggccgtagaccgatatggaagtcgatactgattgcgcctgcgcctgctgcgtaacgccgcagctcgcccccgccagcacgccggcaagcgccatggcgtgactgcgccttgtgttccccaccttcacgcaccaccctcagtttgcatacaaattaagaatgcaaaatatagggtgtggccgcacatccgcatacgaatgtgtgcgcatgaggaaatgcggtttgcgcggaaaatgcggacacaaaaaagcccgcttatgcgggctttcgggggtgatgcttgaagcgagtccgtgctcagaacgggatatcgtcgtccatatcctcgaaaccattcgaggcgggctgctgcggccggcgcgcagcgccaccgctctggccgccgccctggccgccgcggccaccgccgtagccgccgcccgacgcttcgcggctgtagccaccaccgccgcctgcgccgccaccgtagccgccttcgtcaccgccaccgccgccaccaccctggcgcgagcccagcatctgcatctggtcggcaacgatttcagtggagtacttgtcctggcccgactggtcctgccacttgcgggtgcggatgcggccttcgatatagaccgacgatcccttgcgcaggtactggccggcgatttcggcgatcttgccgaagaacgagacgcggtgccattcggtggcctccttcatctcgccgctctgcttgtccttgtagcgatcggtggtcgccaggcggatattggtcacggcgtcgccgctgggcaggtagcgggtttccgggtctgcgccgaggttgccgacgagaatgactttgttgaccgatgccatgaaatgttctccaaaagccacgcgctgtgttgaaaagcgtggcaatacgatgacggtaaagcggatgtagtgtgacgcgatactgcggcgacgtaaacgaacatcgcgcccccggccagacgtcgggtggcgcgatcatgctaggccttttccaggccggattctttacgatgtgatgcggatcaggccggcgttgccggtgcagcttcctgcccgcgcgccggcggcgccttcatgctccaggcgattataagccagagcaacagcaccaccgcgcaaccgacgaacacggcgctgcgcccctcgtgcttgagcagccagccaccggccgcgccgcccaggaacaggcccagcgcctgcgtggtgttgtagacgcccagcgccgccccgcgcgcggccgcggcgtagcgcgacaccagcgaaggctgcatcgcttccagcacgttgaacgcgacgaagaagagcagcagcacgccgacgatggcccacagcccgtgcacggcggcaaacagcagctgcaccgcggtcatcagcgcgaccgcgcccagcagcaccgggcgcacgcggccgtagcgctcggccgccatcatcgggcccagcatcagcacgaaggacaccagcaccaccggcaggtagaccttccagtgctggtccagcggcatgccggcatcggccagcatggtgggcaccaccatgaacatggccacctgggaagcgtgcagcgccagcacgccgacgttcaggcgcgccaggtcggcgttgagcagcaccttgcggaacggcaggcgcaccggatgcggcggcggcggggtcggcaccaggaacagcgtcacgccgatggccaccagccccagcaccgacatcagcccgaagatgccggacatgccgatgctgtgcagcagcggcgaggcaatcaccagcgacagcgcgaaggtcaggccgatgctgccgcccaccatcgccatcgccttggtgcgatgccgttcgcgcgtcaggtcggcgatgcaggcagtgatggccgcggagatcgcgcccgtgccctgcagcgcgcggccggcgatgatgccgctgagcgtgtcggaaaaggcggccaccagcccgccggcgatgaacagcagcagcccggccaccatcaccggcttgcgcccgatgcggtcggacagccagcccagcgggatgtgcaggaatgcctgcatcaggccatagatgcccatggccaggcccacgcgctgggcgtcgtgcccgtcgggcaggctgtgcgcgtattcggcaaagacgggcaggatcaggaacaggcccagcatgcgcagcgcgaagatgctggccagcgacacggcggcgcgcagctcggcgcgggtcatgcgttcgcgggcgggggcctgggatgcgtcagcggcacccgcacccggggaagaagactggatcgacggcattgcgatcgtgggatcgtggaatctgtcaggctggctgccggtgcatcgcaacggcagtttcgatcgggatcgcggggggaagttgccgcccggaacccggggccggcggcggcttcgccgggcgcctgcatggcgcgggccaccccggaaaccgaagttgggtatattaacaggtttgctccttcgcgcttcccgggtcacctggccatgccagctggcccccgggcgtgtgcccgggcgcgcattccggccgtcgccagcggtcggaagtgccaaatacggtacttgtttctgggttttgcgattccttcagacagccttgccaaccccggcagggcggcctgtctggcgacgacttttcggcatatggaagaaatcaagatccgtggggcgcgtacccacaacctgaagaacatcaatctcgacctgccgcgcaaccggctgatcgtgatcaccggcctgtcgggctcgggcaagtcctcgcttgccttcgacacgctctatgccgagggccagcgccgctacgtggagtctctgtccgcctatgcccgccagttcctgcagctgatggaaaagccggacgtggacctgatcgaaggcctgtcgccggcgatctcgatcgagcagaaggccaccagccacaacccgcgttcgactgtcggcaccgtcaccgagatccacgactacctgcgcctgctgtacgcccgcgccggcacgccctactgccccgaccacaacctgccgctgcaagcgcagagcgtgtcgcagatggtggacgccgcgctggcgctgcccgaggacaccaagctgatgatcctggcgccagtggtggccgaccgcaagggcgagcattcggacctgttcgacagcatgcaggcgcagggcttcgtgcgctttcgcatccgctcgggcggcggcaccgcgcacgaggccgaggccaaggtctatgaggtcgatgcgctgccgaaactgaagaagaccgagaagcacaccattgaagtggtggtggaccgcgtcaaggtgcgcgccgacatcaagcagcgcctggccgaatcgttcgagaccgcgttgcgcctagccgatggccgcgcgcttgcgctggaactcgacagcggcaaggagcatatgttcagctccaagtttgcctgcccgatctgctcgtactcgctgcaggagctggagccgcggctgttctcgttcaacaacccgatgggcgcctgccctagctgcgacgggctgggccagatcaccttcttcgatcccaagcgcgtggtggccttccccaacctgtcgctggcctcgggcgcgatcaagggctgggaccgccgcaaccagttctacttccagatgctgcaaggcctggcagcgtactacgacttcgacaccgagaccccgttcgaggagttgccggaaaacgtgcagcagtcggtgctgcacggctcgggcgagcaggaaatcccgttcacctatatcaacgaacgcggccgcaccaccgtgcgcgagcatgtgttcgaagggatcatccccaacctggagcgccgctaccgcgaaaccgattcggtcgccgtgcgcgaggaactggccaagtaccagaacaaccagccctgccccgcctgccaaggcacccgcctgcgcaccgaggcgcgccacgtcaagctgggcgagggcgagcaggcacgcgcgatcttcgagatcaacggctggccgctgcgcgacgcgctgacctacttcctgacgctggacatgcacggcgccaaacgcgagatcggcgacaagatcatcaaggagatctcggcgcggctgaacttcctgaacaacgtcgggctggactacctgtcactggagcgcagcgccgatacgctgtcgggcggcgaggcccagcgcatccggctggcgtcgcagatcggctcgggtctgaccggcgtgatgtatgtgctggacgagccctcgatcggcctgcaccagcgcgacaacgaccgtctgatcggcacgctcaagcacctgcgcgacatcggcaactcggtgctggtggtcgagcacgacgaggacatgatccgcgcctgcgattacgtggtcgacatcggcccgggcgccggcgtgcacggcggcatgatcgtggccgagggcacgccgcggcagatcgaggagtcgccggcatcgctgaccggccagtacctgtccggccagcgccgcatcgaggtgccgaaggagcgcgccgcgcccgacgatgagcgcctgctgcgcatcgtcaacgccagcggcaacaacctgcgcaacgtcaccgccgaagtgccggtgggcctgctgacctgcatcaccggcgtgtccggctcgggcaagtcgacgctgatcaacgacacgctctaccatgcggtggcgcgccacctgtacggctcgacgccggagccggcgccgcacgaccgcatcgaggggctcgagcatttcgacaaggtcatcaacgtcgaccagagcccgatcggacgcacgccgcgttccaatccggccacctatacgggcctgttcacgcccatccgcgaactgttcgccggcgtgccgtcggcaaaggagcgcggctacgacccgggccgcttctcgttcaacgtcaagggcgggcgctgcgaatcgtgccagggcgacggcgtgctcaaggtcgagatgcacttcctgcccgacgtctatgtgccgtgcgatgtctgccacggcaagcgctacaaccgcgagacgctggaagtcctgtacaagggcaagaacatctccgaggtgctggacctgaccgtcgagcaggcgcacgagttcttcagcgcggtgccggtggtgcggcgcaagctgcagacgctgctggacgtgggcctgggctatatccggctgggccagtcggcgaccacgctgtcgggcggcgaggcgcagcgcgtcaagctgtcgctggagctgtccaagcgcgacaccgggcgcacgctctatatcctggacgagcccaccaccgggctgcacttccacgatatcgagctgctgctcaaggtcatccacaagctgcgcgaccagggcaataccgtggtcatcatcgaacacaacctcgatgtcatcaagaccgcggactggctgatcgacatggggccggaaggcggcgccggtggcggccaggtgatcgcgcgcggcacgccggaggatgtggccaggagcaaggcgagctttacgggcaagtatctgaagccattgctggagcggtaaggccttaggaattttcggatacaggcccgggaagaattgtcgcgactcgcttacgcaagcgattgcacaagttgaggtgtatcaagatgaggtgagcttgccgctgctgaggcgggcctgccccttcagtccagcccggcgttgggcagcacccgcgcgcggcgcggcgctccgcccggctgcagttcgatcgcgacgccgccaccgctgtctgcgccgtggccgctcagcgcggtgatcaccacctggtgcgtgaccagcaggtaaggcccgccgcgcggatcgagcccgtcgataaagcgcgaaagctgcgcggtctgcgcttcccggcgctgtgcatccgcgccaaaaaatgaattgagcaatggctggacccgcaccggacccaggtcgatcaggcgggcggtgtcctggcagcggcaccaggcgctgctgtagacccgcgtcggccggaagcccgccgccttccagctgctaccgagcctcgccgcctgctgccggccgttcgcgtccaggttgcgctgggtcgaacagtcgtccagcttgaagcccggcggatcgccgacccccggcgcactcgcatgccgcagcacgacgacgacattggggcgcttcagttcactgacggcgatttcgccctgtgatgccggaacgacctgggcggcggccacgcacggcgccatggcaagccatgcgaggaagaggcgaagaagcggcatcggcgtctccggtgacgggccagtccatccggtatagcaggtacgcgtgccatgcgaggatccctgcccgcttgcattcaccaccccgcgccctaccatgaaccggatggcggcaagccgcgccgccattctggagccagccatggaactgacggtcgtaccggtcaccaagccggaagccaccaacttcatcttcggccattcgcatttcatcaagaccgtggaagacctgcacgaggcgctggtcggcacggtgccgggcatcctcttcgggctggcgttctgcgaggcctcgggcaagcgcctggtgcgttggtcgggcacagatgaagacctgatcgacctggcctgcgagaacgcccgcgccatcggcgccgggcataccttcgtgatcttcctcggcgacgggttctttccggtcaacgtgctggccgcggtgcgggcagtgccggaggtgtgccgcatcttctgcgcaacggccaacccgaccgaggtgatcatcgcccagaccgatgccggacgcggcgtggtgggcgtgatcgatggtgcctcgccgctggggatcgagaccgatgccgatgtggccgagcgcaaggcgctgttgcggaagttcggctacaagctctagcgtcgccgctcagtgctgcgctgcctgcaccgccggcaccgccggcacatcgtcttccttcatccggctgcggttgagcaccccagcctgctccagcaccggataagccgtcgcacagaacagcgaattcagccgtttgagctcgctgatcacatccaggtgcaatgagctggtctcgatgctctcggcggtctgcaccgccacgcgctgcaggtgggtgcgcgcgtacttgcgctccagctcgcggaagttcgctttttccgccatcagcgcctgggcgctcttgaggtcgccgttgagaaacaccgacaggcccagccgcagattggcgaccaggcgcgcgtgcatctcggcgatttcctgcattcccgcctccgagaacatcaggttgtgggcgatcttcttgtccttggtatcgagcaggatgcgctcgatgatgtcgcccgcgtgttccaggttgatggtgagcgagatgatctcggtccagcgctggccgtcgcgctcgtccagcgcttccaggctgatgcgcgtcaggtagagcttgatcgcggtgtagaggtcatccacctcgttgtcgatgcggcaggtggcgtcggccagcttggcgtcgttggtgcgcagcacgcgcagcatgttgtccagcatctgctcgacgcggtcgccgatgcgcagcacttcgcgcgcggcgttggccagcgccagcgttggcgtggacagcgcggccgtatcgaggtggcgcggcgtgacctggctgtcgccggtgttgcgcccgggcagtaccttctcgcacagccgcgccagcggcgcggtggcgcccagcagcagcaccgccagcgcgacgttgaacagcagatggaaattgacgatcagccgttgcgggtcatggtccagcagcgccagcagctcctcggcctggcccagcagcggcagcgccaccagacagcccagcaggcgcgacagcaggttgcccagcgtcacgcgtttgcccggctggttgttgcccgaggtggtcagcagcgccgagatgcccgaacccaggttggcccccagcaccagcgccagcgccacgtggatcgacaccacgccggccgaggccagcgcgccgcagaacagcaccacggccaggctggaatagcacaggatggtcaggaaggcgccgaccagcatgtccagccccgcgtcgccggtcagcgaggcgaacaagaccttgacgccggcagcctgcaccacgggacgggtggcgatggagatcagctcgagcgccagcgtgatcaggcccaggccgatcagcacgcggccgacgtggccggccctgctgcccttccaggtcagatggcagatcacgccgacaaagatcagcagcggcgacagccaggacaggtccagcgagaacacctgcaccatcagcgcggtgccgacgttggcgccgagcatgatggccagcgccggtgccacggcgatcaggccctggccgacgaaggagctgacgatgaccgcggtggcattgctgctctggaccagcccggtgacgccgagcccggcaaggaaggcggtgaagcggttggagacgctggtcgacaggacatggcgcaggttcgcgccgtagacgcgcaggatgccgaccttgacgatgttggtgccccagacgagcagggcaacgcctgatagcaggtgaaggagtacgcccatggtgcgcctttgtgtgaccagtgccgacaaaaccctggaggctaggcccggtcatcgtgtagttgtcaatgaggcattatgcgcccgtcacccgacagcggcaacggcatgggcgcggcgcgcggacaatgggcaacaccggcgcgcggatgcgcgccagcggcgccgctcagggcagcgcgaccttgatccccagcccgacgaagatcgccccggcggcgcggtccagccagcggccggtggccgggcggcggcgcagccaggcgcccagccagcccgcgcacagcccgaacagcgagaacaccaccgccgtctgcagcatgaagaccacgcccagcagcaggaactgcagccccgggtgcgcggcatcggcgcgcacgaactgcggcaggaacaccaggaagaacagcgtcaccttgggattcatgatgttgccgagcacgctctggcggaacacgcgcgcgagcggcaccgcatcgacatcaccgccctgcgccagcccgccctttgcgcgcagcgcctggatgccgatccagatcaggtaggccgcgcccgcatacttgatcagctggaacgccagcggcgacgagcgcagcaccgcggccagccccaccgccgcaatcacggtgtggaacaggcacccgaccgaaaagcccagtgccgcgaccagccccgcgcgccggccctgcgccatgccgcgcgccagcacctgcaggttgtcgggccccggggccacagtcacggcaatcgaagtcagcaggaacagcaacaggtcaggcatggggtctccttgcgtggaaatcttgcgggccggtcagcgtggctcagtgcccttcgaacttgcacacggtgaacagcggcagcccgccgtcctgcagcagcttcgagccgcccagttcgggcaggtcgacgatggcggcgccctccaccaccgtcgcgcccaggcgctccagcagcttgagtccggccatcatggtaccgccggtggcgatcaggtcgtcgaccagcagcacgcggtcgccggacttgcaggcgtctgcatggatctcgacggtggcgctgccgtattccagctcgtactcctcggccacggtctggaacggcagcttgcccttcttgcggatcggcacaaagcccaggttcagctcatacgcgacgatcgcgcccaggataaagccgcgcgcgtcgatgcccgccaccaggtcgagctgcgcatccatgtagcggtgcacgaagacatcgatcagcacgcgcagcgtcttggggttctgcagcagcggggtgatgtcgcggaacatcacgcccggcatgggccagtccggcaccgtacggatgcgctcgcgcaggtagccggtgacgtcgccgagctcgggggactggatgatggagtctgccataggggtctggaaacggtaggcgcgcagcgtggcgcgccaatcagaaagaggggtcgcagtgggtcgcggcaggatggccgccggcgcggtaaccagttaccacccgcgccatcggggcggccagcacaatggccctgccggcccgcttggctggccaggggccgggctgccgcgtccggcacccgccggacacccgtaaccatacaggagagcgcgatggcaaagaagattctgatgctggtgggcgactacgccgaagactacgaaaccatggtgccgttccaggcactgcagatggtcggccacaccgtgcatgcggcctgcccggacaagcaggcgggcgacgcctgcgccaccgctatccatgacttcgagggcgaccaaacctacaccgagaagcgcggccacaacttcaccctcaatgcgagctttgccgagatcgaccccgccggttacgacgcactggtcatccccggcggccgcgcgccggaatacctgcgcctgaacgcgcgcgtgctggagatcgtgcgccacttcgcccaggcggacaagccgatcgccgcggtctgccacggcgcccagctgctggccgcggcaggcgtgctcgaaggcaagacctgctccgcctacccggcctgtgcgcccgaggtgaagctggccggcggcacctatgccgatattcccgtcgaccaggcccataccgacggcaacctcgtcacggccccggcctggcccgcgcatccggcctggctggcgcagttccttgccgtgctgggcacgcggatcgtacattagagctttccgcacgcggcgcccccacgcgtgaaggcacggcccgccccatccgcgagccgtgcacatgcccgcaggctgcgccgcccgcacgggagcatccatgtgtgaaatctttatccgcgccaatccggcgtcgtaccaaagccagtcgcgctcgctgcgcctgcatggcgtggccaccagcatccggctggagagcctgttctgggaggtgctggaagaactggcgcggcgcgacgacatgaccgtcaaccagctgatcacgcgcctgcacgatgaactgaccgaacatcgcggcagcgaggcggtggccggcaatttctcgtccttcctgcgcgtgtgctgcctgcgttacctgatgctgcagggcgaaggccgcatcccggccgatgccagcgtgccgatccgctcgctggacgcacgcgccgtgctcgacaacctgccggaatcctgggtcgaggcgcgtccgcactgacgcgcacgacgccctggctcagccgttcaggatgcgagtttccgcagcctccagcgcctcgggcgggccgcgcagcaccacgatatcgcccggctccagcacggtctcgggctccggatcgaaggcgcggatgccgcgccggcgcactgcggtcacctccacgccgatccgctccagccccagcacgccaagacgccgccccaccgccgtggattgcggcccgagcgacacggaatgcagccgtaccgaatcgcgctcgaccatgtcctcatcatcgtcgcggccgtggaaatagccgcgcagcaggctgtagcgcgcgtcgcgcgcctcctgcacgccgcgcagcacatgccgcatcggcacgcccagcagcaccagcgcgtgcgaggccagcatcaggctgccctcgatgatctcgggcaccacctcggtggcgccggccttctgcagcgtatcgagctctgaatcgtccaccgtgcgcacgatcaccggcagcgccggcgccagttcctgcacgtggtgcagcaccttgagcgccgatggggtgttggcataggtgacgatcagggcggcggcgcggtggatgccggcggcgatcagcgcctcgcgccggcccgcgtcgccgtagaccacggtatcgccggccgcggcggcctcgcgcacgcgatcggggtccaggtccagcgccacgtagttgatgccctcgcgctccagcatgtgcgccaggttctgcccgctgcggccgaagccgcagatgatcgcgtgcttctcggtctgcaggctctgcgcggcaatgcgggtcatgttcagcgactgcatcagccattcgttggcggcaaagcgcagcacgatggcgtcgctgtactggatcaggaatggcgcggccagcatcgacagcagcatcgatgccaggatcacctggataagcaccgggtcgaccaggttcaggccgtcgatctggttcagcagcacgaaaccgaattcgccggcctgcgccagccccagcccggtgcggatcgccaccccctggcgcgagccgaagacccgcgccagcagcgcgatcagcaccagcttgaacagcaccggcaccaccagcagcgccagcaccagccatacgtggtcgagcaccacgcggatattgagcagcatgccgatggtgacgaagaacagtcccagcagcacgtcgcggaacggcttgatgtcctcttccacctggtggcggtagggcgtctcggagatcagcatgcccgccatgaaggcgcccagcgccatcgacaggcccagccgctcggtcagcgccgccatgcccagcgtcaccagcagcaggttcagcatgaacagttcctgcgagcggcgcgccgccaccacgtggaaccagcggctcatcaggcgctggcccaggaagaagatgacgcccagggccaccacgatcttgaccgtggccaggcccagcgccaccatcaggtcgcccggatcgcgcgacagcgccgggatcacgatcagcagcggcaccaccgccagatcctggaacagcaggatgctgatgatattgcggccctgctcgctctcaagctccatgcgctcggacagcatcttggagacgatcgcggtggaagacatcgccagcgccccgcccagcgccaccgacgcctgccaggacagcgggaacagccagttgaaagcccagctggccggcaccaccgccagcatcgacagcaccacctgcgagccgcccaggccgaacaccagccgcttcatcgagcgcagcttggtcaggttgaactccagcccgatcgagaacatcaggaagaccacgccgaattcggccaggtacttggtctgcgcggtgtcgctggccagccccagcgcatgggggccgatcaggatgccgacggccaggtagccgagcatcggcggcagctgcagcatgcggaatgcgaccacgccgaagacggcggcggccagcagcaccagggtcagttccagcggagaatgcatcaggcggtctgggtgaccggccaggcgcgcgtccgacccggcacgggcacccagccggcaaaatacggcgagcacggcaagcacgacgtgcgccatgggtcgggccaggcgccatcgcattcgttggtatacttcgtcgccatgatagccaatttcgatgcggatcgagcactcaggctcgcccgcgacactctccagaccgaagccgatgcggtttccgcactttccggacgcctgaacggcgactttgcccgtgccgtgctgctgatcctgcaatgcaccgggcgcgtggtcgtctcgggcatcggcaagtccggccatatcgggcgcaaggtcgcggccacgctggcctctaccggcacgccggcgttcttcgtgcacccggccgaagccagccacggcgacctgggcatggtcacgcgcgacgacgtgctgatcgccttctccaattcgggcgagaccggcgagctgctgtcgatcatcccgatcgtcaagcgcatcggtgcgcggctgatctcggtcaccggcaaccccgactccaacctggccaagctggccgacgtccacctggacgcggcggtcgagaaagaagcctgcccgctgaacctggcgccgacggccagcaccaccgcggcgctggcgctgggcgatgcgctggcagtggcggttctcgatgcgcgcggctttggcgaggaagacttcgcgcgctcgcaccccggcggcgcgctcgggcgcaagctgctgacccatgtgcgcgacgtgatgcgcaccggcaacgccgtgcccgaggtgcgtgaaaacaccccgctggcccaggcgctgatggaaatcacccgcaagggcatggccatgaccgccgtggtggacccggacggacacgccatcggcgtcttcaccgacggcgacctgcgccgccttctggaaaccccgcgcgactggaagaccgttcccatcggcgacgtcatgcaccgcaacccgcacgtggtcaacgagaaccagctcgccgtcgaagcggtgcaggtgatggaggccaaccgcatcaaccagctgctggtggtggatgacgacggccgcctgaccggcgcgctgcatatccacgacctgacccgcgccaaggtcatctgagcgggcgcgggcccggcacaaccggcacaacgccaaggacaccatgcaggcactcctcgcctccctcagcggcatcgtcatgcggctgctgccgctgctgctgatggccttcgtggcgggcagcacgttctggctggtccagatcaactcccccaaggaagacccggccgcgcaaagcgccaagaagcatgagcccgactacttcatggaccgcttctcggccactgagctggcgccggacggcagcaccaaaatccgctttaccggcgagcgcatggtccatttcgaggatgaccagacctacgaggtgacccggcccgccatgcgcgcgtatgagccggaccgcccgccggtcaccgcccgcgccgatatgggccgcatgaacgccgagggttcggtgatcgacctgtacggcaacggcttcgtcatgcgccagcagggcgtggacgtgtccaaggacccgcagctgaccgccgcatccagttatttccagctgctggtcaatgacgacatcgtcaagaccgacaagccggtcaagctgacgcgcggcccgtcggtgatgaccgccaacggcctgatcttcaacaacgtcacgcgcgaagtacaattgctcggcaatgtacgcggcaccatcatcaccgggccgacccctggccgcgcgccggggtcctgagccccggcccgggggccgcaccaacccgcaccaacgtacccagacgccctcaagcaaccctgccaacatgactgcttccctgacgacatcgtcccgtcgacgcaccgccccggccctgctcgccctggccatggccttcggcctgctggcccagcccgccctggccgagcgcgcggaccgcgacaagccgatggtgctggaggcggacaacgccagctatgacgacgtcaagcagatctatacgctgaccggcaatgtggtgctgaccaagggcaccatgatcctgaagtccgacgccgccgaactgcgcaccgatcccgagggctaccagttcgcggtggccaccgccaagccgggcaagcaggcctacatccggcagaagcgcgaaggcgtcgacgaatacatcgacggctggggcgaccgcatcgagtacgacggcaagcaggagtactccaagctgatcggcaatgcccgcatggcgcgcctgcagggcgccaagcaggtcgacgagatccgcggcgcggtgctgacctacgacagccgcaaggagttctacacggctgccggcggcggtagcggcgatgccgcggccgccaatccgtccggccgcgtgcgcgcggtgctgtcgccgcgccaggaccagaaggccggcgccacgggcagcggcggctcgccgctggacctgaagccggcgcccgcgcctgccaacaaaccctgacgcctggcgccggctgcgtgcatcgcatgcggccggcgccagaaacgcctgaacgccagactgtgccaatgaccgataccgcaaccatcgccgacaagccttccgtcgaagcctccaccgtccttgccggcggcagcacgctggtcgtgcgccacctgaagaaacgctatggctcgcgcacggtggtcaaggacgtctcgctcgacgtgaagagcggcgaggtggtcggcctgcttgggcccaacggcgcgggcaagaccacctccttctacatgatcgtgggcctggtggcgctggacgaaggcgatatcgtgctcgacggcgaccacatcagcggcctgccgatccacgagcgcgcgcgcatggggctgtcgtacctgccgcaggaagcctcggtattccgcaagctcaacgtcgaagagaacatccgcgcggtgctggagctgcaggtgagcaacggcaagcccctgcccaaggccgagatcgagcgccgcctggattcgctgctcgacgacctgcagatcgcgcacctgcgcaacaacccggcgctgtcgctgtcgggcggcgagcgccgccgcgtggaaatcgcgcgcgcgctggcgtcgtcgccgcgcttcatcctgctggacgaacccttcgccggcgtggacccgatcgccgtgggcgagatccagcgcatcgtcagcttcctcaaggcacgcaatatcggcgtgctgatcaccgaccacaacgtgcgcgagacgctcggcatctgcgaccacgcctacatcatcagcgaaggcacggtgctggccgcgggccagcccgaggaaatcatcgccaatgacgcagtgcggcgcgtctacctgggcgagaacttccgcatgtgatgcagcggcctgccatggagcggcaggcctattcgcgggcgcacgtgggcctgccacagccagcagcgatcagaccgcataagcgatagcaatttccgttccaacaacggaaagatgcgcatagaataggtcgcatgaaaccgtcgctacagctccgcctttcccagcatctggccctgaccccgcaactgcagcagtcgatccggctgctgcagctttccacgctggaactgcagcaagaggtcgaacaggcactgacggaaaaccctctgctcgaacgcgagaacgactggatcgaaagcccgctgcgcgtggcggccgacggctcggtcaacctgcagagcgcaccggcgcccgcgccggcagagccgcagggcaatggcgaggcccgcgccgacggcgcggctgacgacgacagctatggcgacagcggcaacggcgacgactatggcagcagcgactggagcctggacgactttgcccgccgcccccagggcgacgaggacgaaaaaacgccgatgcagctgcgcgaagccgagcccacgctgcgcgagtacctgatggaacagctcacgccgctgaagatctcggcgcgcgacaagggcctggccatcttcctgatcgaatcgctcgacgacgatggctacctgagcgcatcgcttgaggagatctgcacggagttgccggaagaactcgagttcgagatcgaggaggtccacgccatcctcacgctgctgcagagcttcgacccgcccggcgtgggcgcgcgcaacgccgccgagtgcctggccctgcagttgcggcgcctgacgcacccgcagcgcgaactggccctgaacatcgtgaccaaccacctggagttgctcgcagtacgcgactacacgcggctgaagaaggcgctgcaggtggatgaagcggcgctgaagtccgcacacgaactgatccgctcgctggcgccctaccccggccatgcatacagccgcccggaggcggacttcgtggtgccggacgtgttcgtgcgcaagggtggcggcggctggatcgcgcagctcaatccggatgtgatgccgaggctgcgcatcaatgacatgtatgcgcaaatcctacgtggcgcaaagggtgagtccggcaccgccgggctgcagcagaagctgcaagaggcgcgctggctgatcaagaacatccagcagaggttcgacaaaatcctgcgtgtctcgcaggccattgtcgagcgtcaaaagaactttttcagccacggcgaaatcgccatgcgccccttggttttgcgggagattgccgatacactgggtttacacgagtcaaccatctcccgggtgacgaccaataaatatatggcaacgccgatgggtactttcgaactgaagtacttcttcggcagccacgtgtccaccgaaaccggtggcgcggcttcgtcaacggccatccgcgccttgatcaagcaactgataggagccgaagacccgaggaatcccctttccgacagtcgcattgccgaactgctgggcgaacaaggcttcgttgtcgcacgccgcaccgttgccaagtatcgcgaagccctgaagatccccgcagtcaatctccgcaagtctttgtagccgagcccaccgcctgcctggtgaggctctttcagaaggagaagcgctatgaacttcaagatcagtggacaccacctggacatcacgccccctctgcgtgagtacgtggaaacgaagctggagcgaatcgtcaggcatttcgatcaagtcattggcgttagtgtgctgctctctgtcgacaaccacaaggaaaaggaccggcgtcagtacgcggaaatcaatctacatctcaagggcaaggacatctttgtcgaagcgcatcacgaagacctgtatgcagcgatcgacgcactcgtcgacaagctggaccgtcaggtgatccgctacaaggatcgcgtgcaaggccacgaccgcgaagcggtcaagtaccagatggccgcagcgcaaatgcagcaatgaccgtgcccggcagccccgcagcgggctgctgaatcaggattgaacaggcaagccgcgccaagaagcgcggcttttttgcgccctcgcgttcccggttgccgccggcatgccgcgcccgcactggcggcgcggcccggctgtggcgccggagccgatgcttttcacccgaatgagcaagggtgttcgcaagcgctgcgccaaggtgtatgctgcgccatacaaagagagggaatcctggccgtgccccgcaccggtgcaccggctccccgccgcggaggcaccattgcatcaccatgtatctttctgcaccggcttgccccgttgcgctgcacaatgcgggagtagtcgctgctctataatgggccggacgcctccggccaggccaacggcaggccggagccggcccactgcccggcggaacggtccgcccgctaactgaaatcctgcgcatcgcccatgaatcgtttggccaaattgctgccacccggcaacatcaccctcgacgtcagcgtcaccagcaagaagcgtgtgttcgagcaggccgggctcctcttcgagaacaaccatggtgtggcgcgcgccatcgtgacggacaacctgttcgcgcgcgagtcgcttggatccaccggcctgggcgccggcgtggcaatcccgcacggccgcatcaagggcctgaagcagccgctggccgcgttcatgcgcctggccgaaccaattccgttcgaatcgcccgatggcaagccggtatcgctgctgatcttcctgctggtgcccgaacaggctacgcagcagcacctggaaatcctgtccgaaatcgcgcaactgctttccgaccgcgacatgcgtgaagggctggccacgctgcccacgcccgatgccgtccatcagttgctgatcgcatggcatccctgatcccctgatccctcaagcgggccggcaccagaccgggcaggcgccaaggcgcttcgcaaaccgccccaccagtcataccgcatggaactcaccggcgtcacctcccagtccatcttcgacgacaacgcagccgacatcaaactctcgtgggtggccggcctggaaggtgcggatcgcgccttcgatgtggagttcgcccgcgaagccacctccgccgccgacctggtgggccacctgaacctgatccaccccaaccgcatccaggtgctcggcaagcccgagatcacttattaccagcgactggacgacgagacccgcaagcgccagatgggcgagctgatcctgctggagccgcccttcctggtgatcgccgacggcatggagccgccgcccgacctggaactgcgctgcacgcgctcgtccacgccgctgttcaccacgccggtgtcgtcggccgcggtgatcgaccacctgcgcctgtacctgtcgcgtatctccgcgccgcgcgtgaccatgcacggggtattcctcgacatcctgggcatgggcgtgctgatcatgggcgaatcgggcctgggcaagagcgaactgggcctggaactgatctcgcgcggccacgggctggtggccgatgatgccgtggacttcgtgcgcctggggccggatttcattgaaggccgctgcccgccgctgctgcagaacctgcttgaagtacgcggtctgggcctgctcgacatcaagaccatcttcggtgagaccgcggtgcgccggaagatgaagatcaagctggtggtgcagttggtgcgtcgcaatgacggcgagttcgagcggctgccgctcgattcgcaatacctcgacgtgctgggcctgccgatccacatggtcaagatccaggtggcggccgggcgcaacctggccgtgctggtcgaggccgcggtgcgcaacaccatcctgcgcctgcgcggcatcgatacgctgcgcgacttcatggaccggcagcgcgccgcgatgcaggccgatgcagtatcgcgcggccagggccgcttgctctgagcgccggcgttttcatttgcttacaacggcgttgacgcagaacgtcaacgttcttcaggcatgctccgttttgtgctgtaatgggcatcgcgcccgttacggaagctgcaacgccggcaatggcgcgcggccatgaagttttccacacccaggagagcaagcatgaagaaattgatcgcgatgtgcgcgctggtcaccccgatgatcgccgccagcgcttttgcacagaccaccgccacgccggcaacccccgcgacgccagccaagccggcggccaccgcaccggcaacgccggccatgcctgccacgcccgccaccccggctaccccggctaccccggacaagcccgcagccaacgcccagcaggacaagatgaaggcctgcaatacgcaagccgccggcaagaagggcgacgaacgcaaggcgttcatgaaggaatgcctgtccaagggcgcgtccaagacccagcaggagaaaatggcctcctgcagcaagtcgggcaagggcaagaagggcgacgaatacaaggcctacatgaaggaatgcctgtccaaggcagcctgagccgcaaccagcgccgcaagctgacgacaaaagcatggcgaaccgcgaggttcgccatgtttgcttttgcgcgtggtgtcatgacgccttcatcacgtgatgctatgcttcagttgctatgcgcatcatcctcatcaccggcatatccggttccggcaagtccgtcgcactgaacgtgctcgaagacgcaggctactactgcgtggacaacctgccggctcagttcatcccggaactgacccgctatctcgacagccagggctatacgcacctgggcgtcgccactgacatccgcagccgcgagtcgctcgaccagttgcccgacaccgtgcgcgcgctggccgctgagcaccaggtcgaggtggtgttcctgaccgccagcaccgacgcactggtgcagcgctactccgagacgcgccgccgccacccgctctcggtccgtaccgacggcgtgccgggcccgggcggtgaacccgccttcaacgacaccgcgctgatggaagcgatcgagatggagcgtgcgctgctgagcccgctggccgaggccgcgcaccgcatcgacaccagcaatgtgcgcaccaatacgctgcgcagctggatcaaggagctgatccgcgacgacagccagcggctgacgctgctattcgagtcgttcggcttcaagcacggcgtgcccagcgatgcggacatggtgttcgacgtgcgctcgctgcccaacccctattacgacctggccttgcgcccgctgacggggcgcgacacgccggtgatcgacttcctgcaggcccagccaatggtgctggcgatggccgaggatatccgcgcctacgtggaaaagtggctgccgagtttcattgccgacaaccgcagctacctgaccgtggcgatcggctgcaccggcggccagcatcgctcggtctatattgcggaaaggcttgccaactacttccgggcgcatggtaatgtgctggtgagacaccgagagctcgcaccggcgggctgacgcaggcgggactgcccactggcatcattggcatctgcgcgccgcgttggccggctggcccattgctgcgcgatacccaagctggcactgcatgtcctcgaccgacctctaccgtcccacggcatcagaagatccgccgcggacgctcgacaacctgccgctgttcccgttgcacaccgtgctgtttcccggtggacggctgccattgcgcgtgttcgaggcgcgctatgtcgacatggtgcgcaactgcctgcgcgacaacactcccttcggcgtttgcctgatcgaaagcggcgaggaagtggcccggccggaccagcccaccgtgccggaactgatcggctgcctggcggagatcgtcgactgcaacatggaacagctgggcgtgctcttgatccgtgcgcgcggccgcgagcgcttccatatcgtcagccatgacacccgcgacgacggcctgctggttgcgcgcgccgaggtgcttcctcccgacatcatcgactgcaagctggagctgctgggcgaatgcctggatgcgctgcggcgcattgtcacgcggctccatgccgagcaacccgaccgcctgccattcgacgagccctacctgtgggacgacccgagctgggtcgccaaccggctgtgcgagttgctgccggtgccgctcaaggccaagcagatgctgatggcgttgcccgatgccggcatgcgcatcgagatcgtgcaccgctacatgcgccagaaccacatgctctaggcgctcagaacagcccgccgcgggcctggtcctccagcagcctgcgcaccggcgcgggcgtacccaccgcatcgagatcgtcaagcgagatccagcgctgcgcggcttccgcggcgccgtcctgcgccatcaggcttgcgccgtccgcgctcacatcgacccggatggcacggatcagcaggcggaagtgcgtgaacacatgggtcagctcgccggtcagtgcggcgcgcgcgggcttgccgaaggcgcgggcatagtcgagcgccgccgcctcggcggcttccgtgtcgaagggcacgctgtcgaccggcatctccggcaggctccacaagccgccccagatgccgctgccggggcgcaggcgcagcagcacttcgcgctggcgccgcaccagcagcattaccgtgctgcgctcggggatggccgcgcgcggcttgggcgtgggcagcacgccggtgagcccgtcgcggcgcgccacacagtcggccgacagcgggcacgcaccggcatcggccaggcaggccggcttgccgcgcgagcacaccgtggcgcccaggtccatcagcccttgcgtataggcgatcatgtcctcggcctggcgcgggcctgcggccggcaaggccagctcggccagctgccacatgcgcgtttccaccacgcgctcgcccggatggccgtggatgccgaagcagcgcgcgaacacgcgcttgacgttgccatccaggattggagaacgcacgccggcgctgaacgcggcgattgccgcggcggtggagcggccgatgccgggcaatgtggccagcaccgcgggatcggtcgggaaacggccaccatgctcgctcaccacctgcatagcgcagcggtgcaggttgcgtgcgcgcgagtaatagcccagccccgcccatagcgccatgacctggtcggcaggcgccgccgccagcgcctgcaccgtgggcagctgcgagacaaagcgctggaagtagtcgatcaccgcgctcacctgggtctgctgcagcatgatctccgacagccagatgcggtacgggtcgcgcgtgttctgccacggcaggtcgtgccggccatgctggcgctgccagtcgaccacgctggcgccgaagtcgggcggcacgcagatatcgtcggggatggcgggaacggcgcgaggggctggtttgcggggcatctgggtgaaacgttctgaagcgcggggcgcgcggcgcaccaaaggaaaaggcgccgctaagtgcggcgccacatgatataccggcttcaggatcaggccaccgcaaggctcgcgctgtcggctgcagccgtcggccgcagcagccgctgcgcgtagccctcgatacggccgctgcgctcgtccaggccgttgagcacttcctcgagttcggcaatgcggctttccagcgtgtcggtggcctcgtggatgcgctcgatcgaatcgacgcgccggcgcagctgcttctggtgctcgcgcacctgcgcttccagcggcgtcattaccgacttgagccagacctcgatatcgcggttcaggtcgcggaagttctccagcacgcggctggccatggtgctgaaggcgctctggaccagctgcgggcgcgagcgcgtcagcatgctgaccgtgccgaagtgcgcatgcaccaggcgcagtgtttcctcaagctcggccacgtagcgctcggcagtgaactgcatcggcgcgggcagcgtgaagccgtgctcggcgttgaagcgccggtacatgctttcgatcagctggtgcagctggccgatcttgttgtcggcatcggtcaccagcctggtcagctgcgcaaacagcgcgtccatgtcttcgcgcagtccgcgcgagaagaagcgctctttcatctgctcgcgcgcgctgcgcatggtgaggcgcacgtcgcgcagttgcaggctcttgatgatgtcggcgctgtggcggccgaagaccaggcgcagcgcctggaacttgctgatgctctgctcgaactcttccttctcgccctgcacccgcatcaacatgtgcttgaccatcgcgtggttcttgccgcgcaggccgcgcagctcgaacagctgctcgacgatatcgcggcggcggctctgcagcagctgctgcgcggcgcgcgccatgtcctgcaccagccggtgcgcctggtccgagacgatctcgcgccggcgcgggatcagctggtcggacagcacgtgctcgaactcgggcaggccgctgcgcgccagcagctcgtcgtcgtgcgtgaccttggccaccaggcccttctgcgccgataccggatagacgcgcgactgttcgatgcccagcacctgcgcggtggtggacacctgccgcgcgatctcctgcgcgatctcgcccggctcgcgcagcggatcccacagcccgtcgatcttgttgagcaccgccaggcagccgcgccggtggccggcgccgacatggctgcgccacagctccaggtcgctcttggtgacgcccgcatcggcggccagcacgaacaccaccacatgggcatcggggatcagccgcagcgtcagctcgggctcggtgccgatcgcattcaggcccggcgtgtcaaggatcaccaggccctggcgcagcagcggatgcgggaaattgatgacggcgtggcgccagcgcgagatctcgaccatgccctcggcatcgaccgcgtaggcggcatcgggatcgttctcgtggtacaggcccagcgcctcggcctgcgccggcggcacgcgcacggtctgcaccacgtgctggaacgcagccagcatgccctcgggcgaagacgggtccagcggcaccgaatgccagtgcgaagccgaggtgccggcctccaggaagtcggcggtagaggcctcctgcaggcgtgtctcgatcggcagcagccggatgcacggcggctcggcctcgtcgtagcgcagctcggtcgggcacatcgtggtgcgccccgccgacgacggcaggatgcggcgcccgtagtcggcaaagaagatggcgttgatcagctcgctcttgccgcgcgagaactcggcaatgaacgcgaccttgagccggtcgctgcgcagcacgctctggatgcgctgcacgcggtcatcggcctgggcgtcgtacaggtcgtgctgctgcagccaggactggaattcggccagtgactggaggaccccggttctccaggcgccgtattgttcgaattggtgggcgagcgttgtcatggagctgttcggctgacttggttttacctcggggcacgccgctttcgcgctgcgcccgtgttcgcacaatgccggcccgaccacggtctacctgcaggcggcgggccattttgtaactttttatgactgcgcacacgatacaggtttccacgacggttttgtggaattcacgcccctcagtaatggcttgcacaaggagtgttgcgccgacccatcgacaatcgccggcggcgcgcattgtgcgccacacggcgcctgcccggggtggccgccaaggctcagtgctggcagttcgggcagtagaaggtcgagcgctggccctgcacgatctggcgcaccggcgtggcgcagacccggcatggctggccggcgcggtcgtagaccaggcaatccagctggaaatagccgctggcgccgtcgctgccgacaaagtcgcgcagcgtgctgcccccgcgctcgattgcctgtgccagggtctcgcgcaccgcctgcgccaggcggtcgcagcgcgcgcggctcaggcgcccggccggggtggtcggacggatgccggcgcggaacaggctttcggacgcatagatattgcccacgccgaccacgatgccgccggccagcagcacggtcttgatggcggcgctgcgcccgcgcgtgtggcggtgcagccaggcgccgtcgaaggcaggatcgaagggctcgatgccgagcgtgcgcagcagcgggtgcgacggcagttcagcctcgggcagcgtgctccacaggatggcgccgaagcggcgcggatcgcggaaacgcaacacgatggtgcccggtttggtgcccagcgcggcgccgggaccgggggccagcaccaggtcaaggtggtcgtgcgcgccaggcgacggcgcctcgggcagcacccgcagcgtcccggtcatgcccaggtggaccagcagccagccggccggctcgcccgccgcctcgctcacgcattccagcagcaggtatttgccgcggcgctcgatccggcgtaccacgcgctgggccagccgcatttccagttgcggatcgaccggccagcgcaggccgcggtggcgcaccgtgaccgcggcgatgcgccgtcccaccacatgcggcagcaagccgcgccgggtcacctcgacctcgggcaattctggcatcgaacctctccgttggttaccgctcaaaactccagcggcgcctgcgggcaccggcctgcggcgccaagcagcgcattgtagcggcaggctacaatgccctttatcaatgcgctttctctcatccctcgccagcgcgcgccggagcaatcactacatgtcggacctcatgccggacctgatgccggactccacattgcaagccaccgcgggcggcctcccgatcgcttttccaggcgccgtttcccgcacagcgcgcacggctggcgccctggcccggtttttccaggcgccccgccgccatgcgcgtgcgctggccgcctcggcattgctggccctggccgccggcaccagccacgccgcgccgcctgcgggcgccatgccattgccaccggcactgcagctggccgcggccgaaagcgagcgccccgccgccgccaggtccgcacgcagcgcgctgccgtcgctggagctgaccgacgacatcgtctatatggtgctggccgcggagatttccatgcagcgcggcctggtcggcccggcctaccggacctacatggaactggcccggcagacccgcgacccgcgcttcgcgcagcgcgccaccgagatcgccttcaatgcgcgcatcccgcagcaggcactggactccgcgcgcctgtggaaggagatttctccgacttcgcccgcggcagcgcaggtgctgtcgacgctgctggtgctcaacggccgctgggacgatgcccggcccctgctgcagcaacagctggcggcggtgccggccagccagcgaggcgaggccattctgcagctgcagcagcagctgtcgcgcaccagcgatgcggccggcgcggccacactgctgcaggacctgaccaagaatgacgccaagctgccggaaacgcagctggcactggcgcgcgccagggaagtcgccggcgacgagccgggcgcgctcgccgcgctcgaccaggcattgcggctgcgcccgggctatgaagcggccgcgctgatggcggccgagctgcgcgccgagaagcagcccgacgaagccgtcgcgatcctgaagcgcttcctcgacaagtcgcccgattcggtcaacggccatatcacgctggcgcggctgtacctgctgcgcaacgacatgcagtcggcccggcaggagttcgagaccctgcgcaaggtagccccgggcgacccgcgcgtgccgctggcattgggcctgaccagcctgcaggccaagagctacggcgaggccgagcagtacctgaaggaatacctgcagctggtagagaagcagcccaccgccaaccccgacattgcctaccagtacctggcgcagatcgccgaggagcgcaaggactacgccggcgccatccggtggctggaccgcatcgaggacatccggctggcgcccgcggcgaccgccaagcgcgcacagctgctggcgcgcatgggcaagctcgacgacgcccaggcgctcttcggcgagatgctcaccgacgccgaggacatctccgatcctggccagcgcgcgcagcgcatgaccgccatccgccaggccgaggtggccacgctgatggaaagcaaagcctatgaccgcgcccgcaagctgctcaacgaccgcattacggccgagcccgacaacgccgactggatctacgagctggccatgctcgacgagcgccagaagcgttacgacagcatggagaagggcctgcgcaaggtgattgcgctgcagccgcagcagaagcagggctacaacgcgctgggctactcgctggcggaccgcaacgagcggctgcccgaggcgctcaagctgctggagcgcgcctccgagctggggccggacgatccctacatcatggacagcctggcctgggtcaaattccgcatgggcgacctgcgcccggcggccgacctgctgcgcaatgcctattccaaggcgcccgaggccgagatcggcgcgcacctgggcgaggtgctgtggcagctcggcgagcatgacgaagcgcgcaagacctggaccgaggccgtccgcatcgaccccgagaacgagaccctggtcgacacgctgcgccgctacaaggtcaacgtgcaagtgtccaagtaaccccgcccgccgcgacccgcagcccgggtccgcggcgccggatttccgtcagccggcggacgccgccgcgccgccgttctcacgaccaagcccatgaaccgatcccgacgcctggcgctcttctgccttggcgccccgctgctgctgcaggcgtgtgccagcgtggcaccgtcgcgcagctttgatggcgaccaggccgccgccagccagcaatacaccggccgcttctccgccaactacgtgcgctacgggcgcgacgaaggcgtgcagggaagcttccgctgggaagagcagggccgcaacgtgcggctggacctggtgtccccgctcggccagaccctggccgtggtcaccgccacaccgtccggcgccacgctcgacctgcccaaccagccgccgcgcaacgcgccagaggtcgacaccctgatggaggaagcgctcggctttgcgctgccagtggccggcatgcgcgactggctgcacggccgcgccacgcagggcgcgcccgcgcgcaccacgcgcgacgagcagggccggctggccacgctggcgcagaacggctggaccgtgcgctacgtcgcctggcaggacgcagccgcccaggtgccgcgccgcatcgacctggcgcgcgacgccggcagcaatccgctgtcggtgcgcctcgtgatcgatccccggacgccgtgaaccacgccatgcatcgcagccagcccctgcccccgcccgaactgcgcgactgccccgcgccggccaagctcaacctgttcctgcacgtgaccggccgccgcgccgacggctaccacacgctgcagaccgtgttccagctggtcgactggtgcgacacgctgcatttccgccggcgcgacgacggcgtggtcgcacgcgtcaccgacgtgcccggcgtgccggccgagaccgacctggtggtgcgcgccgcgcgcgcgttacaggcggccaccggtgccacgttcggggccgacatagccatcgacaaggtgctgccgatgggcggcggcatcggtggcggctcgtccgatgccgccaccacgctgctggcgctgaatcacctgtggggactgggccttgcgcgtgccgaactgatgcgcatcgggctggcgctgggcgccgacgtgccagtattcgtgttgggccagaacgcctttgcacagggcatcggcgaggacctgacgccagtcgagctgcccgagagctggttcgtggtcatccacccgaaacagcatgtccccaccgctgaaattttttcggacgagtgcttgacaagggatacgccgctctccataattgcggtcttcgctgctcgcacaaacaaattcgatttcggtcgcaacgacctggaaccgatagcaacagcgaagttcggcgaagtcgcccgagccctggcatggctgaagcaacacaatcagcatgccaggatgaccggttccggagcctgcgtgtttgcgcgttttcccgacgcagcaacagcgcagcaggttttggaaaggttgcctcccgaatgggacggcaggtgtgtgcgcagtctggcacgtcatccgctcgcagcgctcgcgtagcaagttttcgttcggcgcggtacggcagtctggtaccacgaagaacggcccggttgtgtaggggagtcgccaagttggtcaaggcaccggattttgattccggcattcgaaggttcgaatccttcttcccctgccattacattcctatagtgtccttacggactctctgtatcagtcaccggctttgccggtgacaccaagctcccccagcagcaagacaggtgccccgaatgagcagcgaaggcttgatggtatttaccggcaacgccaaccccaaactcgcggaggctgtcgtacagcacctcggcattcccctgggcaaggcgttggttggccgtttctccgacggcgaagttcaagttgatatccaggaaaacgttcgcggcaagcacgtcatcgtgctgcagtccacctgcgcgccgaccaacgacaacctgatggagctgatggtgatggtcgacgcgctcaagcgcgcctcggcacgcagcatcaccgccgccatgccctacttcggctatgcgcgccaggaccgccgcccgcgttcggcgcgcgtcgcgatctcggccaaggtcgtggccaacatgctggaagtcgccggtgtcgagcgcgtgctgacgatggacctgcacgctgaccagatccagggcttcttcgatattcccgtcgacaacatctacgcttcgccggtactgctgggcgacctgcgcgagaagaactacggcgacctgctggtggtgtcgccggacgtcggcggcgtggtccgtgcccgcgcactggccaaggaactgaactgcgacctggcgatcatcgacaagcgtcgtcccaaggccaacgtggccgaggtgatgaacatcatcggtgaagtcgacggccgcaactgcgtcatcatggatgacatgatcgacaccggcggcacgctgtgcaaggccgcccaggtgctgaaggagcgcggcgcgctgaaggtcttcgcctactgcacgcacccggtgctgtcgggtggcgcggccgcccgcatcgcggactcggcgctggacgaagtggtggtgtgcgacaccatcccgttgtccgaagaagccgccaagtgcaccaagatccgccagctctcgaccgccccgctgctggccgagaccttcacccgcatcgtcaagggcgactcgatcatgtcgctgtttgcgggttcctgatagaatttaaggctttactgcgttgatcgccgtttttcggcgatcaacgtgacttgatcggcgcatcattttctgtttgcgccgcaacgaggctgtctggtcgcggacggccttcttacttttggagtcatcatgaaagttgtcgctttcgagcgtagcgtacagggaacgggtgcgagccgccgcctgcgcaattcgggcaagacccccggcatcatctacggcggcgccgccgagccgaagatgatcgaactggatcacaacgcgctgtggcacgccctgaagaaggaagcgttccactcgtcgatcctggaactggaagtcgctggcaagtcggaacaggccctgctgcgcgcattccagatgcacccgttcaagccgctggtgctgcacgtagatttccagcgcgtgtcggccaacgacaagatccacgtcaaggtgccgctgcacttcatgaaccaggaaaccgctcctggcgtgaagctgggccacggcatcgtcaaccacatcctgaacgacctggaagtttcgtgcctgccggccgacctgcccgagttcatcgaagtggacctggccgccgtcgagctgaaccagaccgtccacctgtcggacatcaagctgccgaagggcgtgaccgtgatcacccacggtgacgacaacccggccgtcgccagcatctcgcaaccggctggagccgtgtcggaagctgccgaaggcggcgaagccgctggcgaaacgccggctgcctaagctgcagcagcggtcgcggcctgccggccgcgccacgaagaaaccgccgcttcttgcggcggttttttttcgcccggcagccgtctgccggtttttcggtatccttggcgcttgtggcgcagccttgcgcgccaacgacccagtcaaacgcatgatcaagcttatcgtcggcctcggcaatcccggtgcggagtacgaggccacccgacacaacgccggcttctggctggtggaccagctggcccgcatgggcggcgccacgatgcgcgtggaaggccgcttccacggcctggccgcgcgtgcgcggctgtgggaccaggacatctggctgctcaagccgtcgaccttcatgaaccgctccggcctggccgtggtgtcgctcgcgcgcttctacaaggtccttcccgacgagatcgtggtcgcgcacgacgagatggacctgccggcgggcgcggccaagctcaagcgcggcggcggcgcgggcggccacaacgggctcaaggacatctcggcccacctgtccacgcaggactactggcgcctgcgcctgggcgtgggccatccgcgcaacgcgcccggcggcgccggcgcgggccgcgaggacgtggtcaacttcgtgctcaagccaccgcggcgcgaggagcaggaagccatcgatgccgccatcgaccgctgcatcgagccgctcggcctgctggcacgcggcgatgctgaacgcgccatggcgcagctgcataccacgcgctgacaaatacgcatattcctgcgacaagcgtatgaaaacgggccgcatctgcggcccgtcgtggtttggcggcccaagactgctgttgcagacaatatgtcatcaaagtgccatgggcggcacatacattccgtggtttccaatcgcgtcggtatcgcatggtggccgatgcgcatgacaacccacaggaggaaagcccatgtcgtacctgaccgatcaagcgcgggccgccagtcgcgctgccaagcccgacgctgacgtgcccggccagatgctcgaagacatcgtagccgccaacccggcccgccgccgggtgctgcgcggcggcctgggcctgtcgctggcctcggcgttcggcagcggcctgctggccgcctgtggcggcgatgacgatcccgcaccggcaccggcccccgcacctgctccggccccagcgcccgccgcggccgccccgagctacgacgtcaccttcgagccggtcgccaagtcgaccgcggatgccgtggtcgtgcccaatggctacagcgtcgacgtgctgttctccgccggcgacccggtcgaagccggtgccaccggctatgccggcgcgttccagtcctcggccgaaaccgagcgccaggccggcggcaaccacgacggcatgcactacttcgcgctgccgggtgtcgatccgcagaagggcggcctgctcgccatcaaccacgagctgccggactacaagatcctgttcgcgggcggcacctatgacgccgccacggccagccccgagcagaagcgcatcgcgctgtcggcggtcggcatctcggtgatcgaagtggaactggcagccagcggcaagtggcaggtcaagcgcgactcgatctacaacaagcgctacaccggcaacacgctgtaccgcgtgggcggcccggctgcttcggtggtgggatcgaccgtagtcggcatgctcaacaactgctcgagcggccataccccgtggggcacctacctgacctgcgaagagagcacggacaactacatcgacccgacccaggccgagaacggctacggctgggtggtggaagtcgatccgtacggcacgctgggctcgccggccaagcgcaccgcgatgggccgcttcgaccatgagaacgtcgccttcctgaccgacgccagcaacaacgtcgccttctatatgggcgacgacggcacgccgggctgcatctacaaatttatcccgagcaaggccttcgatccgaacaaccgcgccgccaatgccaacctgctggacagcggcacgctctacgtggccaggttcaacgccgacggcagcggccagtggatcgagctgacgcagggcaagaacggcctgaccgtgggcgcttcggatccgggcaactggacccagtcggccgtctcgccggcgccgaccacggtcgacttcgccagccaggccgacgtgctgatcaacaccaagtcggccgcgcgcgtggccggtggcacgctgatggaccgccccgagtggatcacggccgcaccggacaaaaccctgtactgcacgctgaccaacaacagcggccgccagcagaccgacgccgccaacccgcgcaagaacaacctgcacggccatatcgtcaagtggaacgaagccggaaattcgccgctggcgaccacgttcacgtggagcatcctgctgcaggccggcgacccgtcgctggccaccgacaacctgaagggcaacatcaacggcgacacgttctcgagccccgacggcctgcgcgtcgacccgcagggccggctgtgggtgcagaccgactccagcaccagcgccacctacaccagcacgttcggcaacaacagcatgtactacatctcgccgacgggtcagtccaagcgcttcctggtcggcccgaccggctgcgaaatcaccggcatcgcctacacgccggacctgaccacctgcttcatcaacatccagcaccccaccggcgcgtggccggacgcggccaagccgccgcgctcgtccaccatcgtggtgcgccgtggcgacggcaagccgatcggtgcgtgaccgcgcagtgcagtaggtagtaccagcagtaactggggaaaagttaaacccccgtcaccttgcggtgccgggggctttttttgcctggctgaagctgcgggtcaggccgcgtgcttggcggccgtcagcagccggtagcgctgcatcaggacctcatgcgtttcgacgcggttcggatccttggggatacaggcgaccgggcagacctgctggcattgcggctcgtcgaagtgcccgacacactcggtgcacttgttggggtcgatttcatagatctcgggccccatcgaaatggcttcgttcgggcactcgggttcacaaacgtcgcagttgatgcagtcgtcagtgatcatcagcgccatggtgtttccttcctgcggacacgcccgcgcccgactggccgcgactcgacgtatctgtgtctgctattttattccggtttgccgattttctcttgcagccagcgttccaccgacgggaacacgaacttgctgacatcgccgcccagcaccgcgatctcacgcacgaaggtgccggagatgaactggtactggtccgacggcgtcaggaacatggtttccacgtcgggcagcaggtagcggttcatgcctgccatctggaattcgtactcgaagtcggacaccgcgcgcaggccgcgcacgatcacgcgcgcattgttgttgcgcacaaagtccttgagcaggccggaaaagccttcgacgcgcacattgggataatgcccgagcacttcacgggcaatgccgatgcgctcttcgagcgaaaagaacgggcgcttgttggggctgtgcgccacgccgaccaccagttcgtcgaagatgttcgacgcacggcggaccagatcctcgtgtccccgggtcattggatcgaacgtgccgggatagaccgcgatgaccatacttcctccttgatctgcccgctgccggccttgggccgcctcttgcgccggccggaccggcgtgggtgctgcgtcgcgagcgttgtaacagcggcgtagtgtaaccccaaatgcgccacttggaagccgcccggcgcaccgttttgccgcagcgcagctatgaagccgtttcccattgaggaaggggaccttcctcattgcagaacaggcctacccggaccatcgccccagactggtgcatcaggcagcgccgttgcccggcacgcgatgctgcagcaggtggaaatgcaccgcgccggcgcgcgcgtggcgcacgatttcaagcgacgccggcaccggcgcgtcggcaccggtcagcgcatggtcggtctcgacatagactgcgccgccgggccgcgacagcctcgccgcgtgctccagcgccggcccgacccagtcctcggcgaagggcggatccaggaagaccacgtcgaagctggcatcgggcagttgcgcggcaatggcaaaggcatcgccctgcatcacgcgcacctgagccgcgtcgagccggtactggttgtcgcgcagctgcttggccacgcgcgcattggactcgaccagcgtgaccgcggcggcgccgcgcgaggcggcctcgaagccgagcgcgccggagccggcgaacaggtccaggcattccagcccggacaggtcctggccgagccagttgaagagcgtctcgcgcacgcggtcgggcgtggggcgcaggccctgggcatcgggaacgggcagcaaggtgcgcttccagcggccgccgatgatgcggacctgggacggctcctggcgcggtgcctggcgtggcgccgcggaaacgggggaacgcccgccgctggcagcggcaggagaggcgggtcgcccgccggtggcgggcgacggcaatcgggaacgcgaattcatcccgtgattgtagagcctgcgggccggttcgccgcacgcgccggagccccggcgctcatgacgggcccaagcggcgccggcatcactgtctggcggcagtcgcaggcgctgcgaccgggccgccgacgatcaccgtcgccatattgtccgggcgcacatggcgctggaaagcggccctgacctgctcacgcgtgaccttgccaatctgggcggtccaggtgtccaggtaatccagcggcagcccgtaccagccgatattggcgacgttggtcagcagcttgcggttgttgtcgatgcgcagcgggaaaccgttgatgaggttgtccttggccgcgcgcagctctttctcggtcgggccctcggcgacaaagcgcgccagcacctggcgcaccagcgccagcgcttcgtcggtctgcgccttcttggtctgcaggctgatgccgaacggacccggctgcttggacggcgcgaagtagctgtccacgccgtaggtcaggccgcgcttctcgcgcacctcgtcagtcaggcgcgagctgaagccgccgccgcccagcacgtagttgcccaccagcagcgcgaagtaatcggggtcgccgcgggcaatggccggctggccgatggccacgctggactgctgtgccggatgcggcatgcgctgctcgctcggggcgatgttcaggcgcacctgcggcatggccggcgccgcgctgccgggcggcagcccgcgcgtgagctgctcggcaatggcttcggcctgcttgcggtcgaccgcgccgatcagcgtcaccaccgcgcgctgcgcgccgtagttgtcgcgccagaacctgacaatgtcgtcgcgcgtgatcgacgccacgctgtccggggtcgcggccacgccgtagggatggtcgggatacatggccttggccagcgccttgtcggcgatcacgccgggcttggcgtcggcttcgcggatggcggtgatcaggcgctgcttctctcgcccgaccacagcgtccgggtaggtcggcgccttgatcagttgcgcggccagcgcgaccgactggtccagctccggctgggcggtcagcgtgcgcagcccgatgccgccgcggtcgccgccggcggcgccgccaaaggcggcgccggtatcggcaaagccatcggcgatcttcgcttcatcgcgcgccggctggccttccagcgccgcggcgcccttgtccagcagcgcggcggtcagcgtggccagcccggccttgcccggcgggtcatagcgactgccggcgtcgaagtcgatattgacgtcgagcatcgggatcgacgggctatgcacaaagaacaccctggcgccggttgacgcggtccagtgctcgatcgggatcgcggcctgcgccagttgcgcagccagcaggaccacggcgcccaatgcggcgccggccagtttgcgcagcgcacgctgcggggtggtgacggactgagtcatcgcctttcctcagtggcgcaggcccgacggggcctgggacttgggcttgttcggatcgatcggctgcggcaccagcgtggccacggtcaggttgtcgtcgttgaaatacttcgcggcgacggcctgcacctgcgccggcgtgacggccttgatcttgtcgagcatgcggtcgatctggcgccaggagatatccgagatctcggacacgccgatttccatgccctgcccgaacaccgaatcacgcttgtagatctggccggccaccacctgcgccttgacgcgcttgagctcctccggcgacacgccctccttggcgatgcgctggacctcggcgcgcagcgcgcgctcgatctcgtcggtgttgtggcctgtggcgggcgtgccgtcgagcacgaacagcgactcgccgcggttgatgctgtcatagccgacgttgacgtcgtcggccaggcgctgctcgcgcaccagttcgcgcgtcagtcgtgcgttgtcgtagccgttgagcacggccgccagcacctccagcgcgtaggggtcgacgtccttctcgatatcgcgcaggcgcggcaccttgtaggccatcaccatgtactggttctcggccggcgccttgacccagatgcgcttgatgcccttttgcgccggctcttcctggtccttgcgcagcggcagcgtacgcggcttgagcttgccgtaatagcgctcggccagggcgcgcacttcctcggccttgacgtcgccggtgacaatcaccatggcgttgttgggcacgtaccagtggcggtaccactccttgacgtcgtccacgcgcatattgaccaggtcgtccatccagccgatcaccgggtggcggtacgcggcggcggtgtagaccgtggccagcaactgctcatagacggtgccgcgcgcggagtcatcggtgcgcaggcggcgttcttccatcaccaccttcatctcgcgttcgaactcgtccttggtgatgacgaggttggccatgcggtcggcctccagctccatcatcctcggcaggtactgcttgccgatctgctggtagtacatggtgaagtcgcggttggtcatggcgttctcacgcccgcccagcgcggccacctgcttggagaactcgcccacgccgaccttgggcgtgcccttgaacatcatgtgctcgagcatgtgcgccacgccggtggtgccgctgacctcgtcgatgccgcccacgcggtaccagatctggtgcgccaccgtgggcgcgcggtggtcttccttgacgatcagccgcagcccgttggacaggcggtattcggtcgtgccatgcgcggtcgcgccggccggggcggtctgcgtgccgggcatcggcgaagccaccacgccctgcgcccctgccggcatcgaccacggcagcaaggccagcagcagcgtgggaatgactcgccgcgcgagacgcgcggcgcgggcgggaagcggtttggaggaaggtgaaaggcgttggaagcgcgttgcgacgcaggctttggtgccttgtgcgcccgcagcggccaggacagcgcaatggttcatgcgaccccgtctgctagaattttgccgatcgactcacgtgcgcaagactgcgcgcatgaatctgccatgtagcgaactatacgcaatcgccggccgggaccacaacgctttctccccagccatcgcgatgcctgcgtaacccattgatttataaccggttgcctgctggcatttggctgccgccagggtatcggccccggtattgactccattccccaatgtttagtttctggaagaagcgcaaggccgagcccgcgcccgccgaggcgccagccccggcccccgctccggtcgaggtccccgcccccgtaccggcaccggcccccacgcctgcgccagtccctgcgcccgcaccggcaccggtcccggcgcaagtgccaccccctgccccagcgcccgtggcggccccgatccccctgccggcgcccgcaccggccgaagcgctcgagctggtcccgccgcccgcccagaccgctgaagcgaagctgggctggatgcatcggctgcgtaccgggctgtccaagaccagccgcaacatcggcacgctgttcgtcggcgtcaaggtcgacgaggccctgttcgaagaactggaaaccgcgctgctgatggcagatgccggcgtggaagccaccgagtacctgctgggcgagttgcgcaagcgcgtcaaggccgagcgcatcgagaccgccgaaggcgtcaaggcggcgctgcgcgagctgctgacgcagctgctgcgcccgctggaaaaaaccatggcgctgggccgcgagcagccgctggtgatgatgatcgcgggcgtcaacggcgccggcaagaccaccagcatcggcaagctgtgcaagcacttccagcgctatgaccagaaggtgctgctggccgccggcgataccttccgcgccgccgcgcgcgagcaactgacgatctggggcgaacgcaacaacgtcaccgtggtggcgcaggaaagcggcgacccggcggcggtgatcttcgacgccgtcaatgcggccaaggcgcgcggcatcgacatcgtcatggccgacaccgccggccgcctgccgacgcagctgcacctgatggaagagctcaagaaggtcaagcgcgtgatcagcaaggccatgccgagcgcgccgcacgaggtgctgctggtgatcgacgccaacaccggccagaacgccctgcagcaaacccgcgccttcgacgacgcgctgggcctgaccggcctgatcgtgaccaagctcgacggcaccgccaagggcggcatcctggcggctatcgcgcgccagcgcccggtgccggtttatttcattggcgtgggcgagaaggtggaggacctgcagccgttcaaggcggatgagttcgccgaagcgctgctggggtaaggcccggtggcgaacgcttattccgcgtcaggctgcgccttcggctccgccttctggaaagcaggcagctccatgcaggtttcatagatcctggcgatcgccgggtagcgggccaggtcgatattgaagcgctgcgcgttgaatacctgcggcaccaggcagatatcggccagcgtgggcgtatcgccaaagcagaaacgcccggccttgccgccgcgctccaggttggcctgcagcgacgcaaagcccagctcgatccagtggtggtaccacgcgtccttgacctcgtcggtcacgcccacggtgtgcttcaggtacttcagcacgcgcaggttgttcagcgggtggatctcgcacgcgatctcctgggccagtccgcgcacataggcgcggtccagcgccgtgccgggcagcagcttcggctcgggatggacctcgtccaggtattcgacgatggccagcgattgctgcagcacgtgctcgccgtcggcgagcgccggcaccagtccgtcgggattcacggcgcggaattccggcttgagctgctggccgccttctttcagcaggtgcaccggcacatagtcataggacagccccttgagttccagcgcaatgcgcacgcggaatgaggccgaactgcggaaatagctgtaaagctttagcatcggatcagactaccttgatggtgagatcgcccacgccgccgacgtggcactgcatgacatcgcccttgaccaccgggcccacgccttcgggcgtgccgctgaagatcaggtcgcccggctgcagctcgaacagcttcgacaggtacgacaccatctccggcaccgaccagatcaggtcggacaggtcgccgcgctgcttctccacgccgttgaccgccagcgtcactgcgcccttctgcggatggccgatggccgagaccggcacgatcgggccgatcggcgcggactggtcgaaggccttgccggtctcccaggggcggccggtcttcttcgattcgttctgcaggtcgcggcgggtcatgtccaggcccacggcgtagccgaacacgtggccggctgccttgtcgaccgggatgtcgcggccgcccttgccgatcgccaccaccagctccacttcatagtggcagttgctggtgcccggcgggtacgggaaggcgccttcggtgccgtcggcgacgtagctgaccgcgtcggacggcttgcagaagaagaacggcggctcgcggtcggggtccgagcccatttcacgggcgtgggcagcatagttgcggccgacgcagtacacgcgccgtaccgggaaactagcattgctgccgcgcaccggcacgccaacgggcgcggccggagcgaacacgaattcggtcatgcatctctccagattgttctgatcggtgctgcggcgcgggtgggcagggttgcaggaagcagccatgcgcggcgtcgccagcagacgcgcccggcgcagcagggcaacaggatacaccgcgagagttggctctgcgtacgaccgcatacaatgaatccaggcatcctcgcagcgccagcgcaccgaactggcgcaggtgccggatacttacccggcgcgaatcttgcatggcgcactgcaacagagcctagccatgacacgacgccacccgcccccatcgcccaccgctgccgcacctgccccgcccactgccggcggccgggtgttgcggatcctgctcgtgcgcgacccgcatgacgccgacccgctgaacgtcgagaccatccgcggcgggctggtcagcgccggctttaccgagatccagatcgtcgatgccgacctgcgcctgccggatgtgatcacggccacccagcccgacatgctgatcatcgcgtctgaatccgccgcgcgcgacaccatcgagcatgtctgcgtctcgacccagcatgcgccgcgcccgatcgtgctgttcaccgacaacgacgacagccagcgcatcaaggcagcgctgacggcggggatcaccgcctatatcgtcgacggcctgcgcgccgagcgcgtcaagaccgtgctcgacgtggcctacacacgcttcgaactggatcagcagctgcgcgccgagctcgatgccacccggctcaagctggccgagcgcaaggtggtcgagcgcgccaagggactgctgatgcaggcgcgcggcctcagcgaggacgaggcctacaagcgcctgcgcagcatggcgatggagcgcggcctgaagctggtggacgcggcccagcgcgtgatcgacgtgatgggctgagccgctcccgcctgccagccgtggtgcgccgccgcacgcgactggtgcaatgcacgctcctggcgctgccgcactgcgtcacctccctcccctgctcccccgaatgtggcggcggccagcgcgcgcgcaccacatccgatcatttccccccgatccgtcacaaatccgccctcgaatgctgcactgcacaggctggcacacgccttgcgttatgcaggtatcggccaacggcggccgaccaacaatttcggcggacacggccaacgcgggctgcgtcacgccacggacaacggcgtccctgcgccgcaccggtcttctggcgaagccggtcgcggaggggacgccttttttcttggagccatgcaatgccctctcgcctcaggattgccaagccgctgcacgcagccgtccacgttcccgacgcggctgccgacgccgtgccggccagcagcggccgccgccgcgcgcttgccaccatcgccggcgccagcgtgatgacgctggtcgatccgctggtgcgcgccggtgcgtgggcagcgggctcggacgcgcccgagaagaccgacgtgcgcatcggctttatcccgctgaccgactgcgcctcggtggtgatggccgcgacgctcgggctggacaagaaatacggcatcaagatcacgccgaccaaggaagcctcatgggccggcgtgcgcgacaagctggtcaacggcgagctggacgcggcgcacgtgctgtacggactgatctacggcgtgcagctgggcatcggcggcccgaagaaggacatggccgtgctgatgaacctgaaccacaacggccaggccatcacgctgtcgtccaagctcgccgagaaaggcgtcaaggacggcgccagcctgaaggcgctgatgatgaaggagaagcgcgactacaccttcgcccagaccttccccaccggcacgcacgcaatgtggctgtactactggctggcggccaacggcatcaacccgatgcaggacgccaaggccatcacggtgccgccgccgcagatggtggccaatatgcgcgtgggcaatatggacggcttctgcgtgggcgagccctggggcgcgcgcgccatcgccgacaagatcggcttcaccgccgagaccacgcaggccatctggaagggccaccccgagaagaccctgggcaccaccgcggagttcgtgcagaaataccccaacaccgcgcgcgcgatggtggccgcagtgctggaggcatcgaagttcatcgatgcgtcggcctccaaccgccgcaagaccgccgagaccattgccgccaagtcctacgtcaacaccgacatggacatcatcctggaccgcatgctgggccgctacaccaacggcctgggcaagacctgggacgacccagacgcgatgaagttctaccaggacggcgccgccaactacccgtacctgtccgacggcatgtggttcctgacccagcacaagcgctggggcttgctgaaggaacatccggactatctcgccgtggcccggcaggtcaaccgcatcgacgtctacaagcaggccgccgccgccgcgcaggtgccgctgcccaagagcgacatgcgcagcgccaagctgatcgacggcgtggtctgggacggcaaggaccccaaggcctacgccgacggtttcaagatcaaggcctgacgcaagccttcccccactgatccgcagtgcccctgacgaaaggagccagacgtgaatgccatagcccaccccacgcccgatggtgcaaccgtagccgccagcgccgaccccgacaccaaggagcgggcgcgccggcgcgagcaggaaatcgccgcgcaggcacggcgcgcgcaacgccgcgaggcggtcgccgcgctggtgctcaaggccgtgccgccggtactgggctttgccctgttcgtgctggcctggcacggcatcgccacgatgatcccggccattcccacgccgcaggccacatggaacgccgcggtgccgctgtttgccgacccgttctaccgcaacgggcccaatgaccagggcatcggctggaacgtgctggcatcgctggcgcgcgtcgcggcgggcttcggcctggccgcgctggtcggcatcccggccggcttcctgatcgggcgcttcgccttcctgaacgcgatgaccgcgccggtgatcagcctgctgcgcccggtctcgccgctggcgtggctgccgatcggcctgctgctgttcaaggccgccaacccggccgcgatctgggcgatcttcatctgctcgatctggccgatggtgatcaacaccgcggtcggcgtcacgcgcgtgccgcaggactacctgaacgtggcgcgcgtgctggacctgtcggaatggaaggtgttcacgcgggtgctgttccccgcggtgctgccctacatgctgaccggcgtgcggctgtcgatcggcaccgcgtggctggtgatcgtcgcggccgagatgctgaccggcggcaccggcatcggcttctggctgtgggacgaatggaacaacctgaaggtcgagcacatcgtgatcgcgatcttcgtgatcggcatcatcgggctgctgctcgagcatgcgctgctggcgctggcccggcgcttcagctacggcaccaactgacacgcggggagaatcgccatggacaagttcgtcagcatcgaaaacgtcggccagaccttcaagacccgcaagggcccgttcgtcgccctgcgcgatatcaacctgcatatcgccgagggcgagttcatcacgctgatcggccattcaggctgcggcaagtccacgctgctgaacctggtcgcgggactggccacgcccaccaccggcgcgctgatctgcgccgggcgcgagatcgccgggccggggccggagcgcgcggtggtgttccagaaccattcgctgctgccgtggctgacgtgcttcgagaacgtctacctgggcgtggagcgcgtcttcgccgccagcgagagcaagccgcagctcaaggcgcgcacgcacgacacgctggcgctggtgggcctgacgcacgccgagaacaagtatccgcatgagatctccggcggcatgaagcagcgcgtgggcattgcccgcgcgctggcgatggcgcccaaggtgctgctgatggacgagcccttcggcgcgctcgatgcgctcacgcgcgcgcacctgcaggacgagctgatcaagatcgtggcgcgcacccgcagcaccgtggtgatggtgacccacgacgtcgacgaggccgtgctgctggccgaccgcatcatcatgatgaccaacggtccggccgcgaccatcggcgagatcctgaaggtggagcttccgcgtccgcgcgaccgcgtcgcgctggccgacgacaaggcctaccacgcctgccgcaccgcggtgctggacttcctctaccgcaagcagcgcaacccggcgctgcaggaagccgcgtagtgcccgccggccgcgtgccggtgggcggccctatgtggcacaggcggcgatgggcgcggcggcctggctccgctatcatgaacccagaacagactacccccacgccgccatgaccacgccagccacgtccttccctgctgcccgctatatcaaggagatcggccgcggcgtcaacggcgcgcgggcgctgccgcgcgaagacgcgcaggccctgttcgacgccatgctggccgggcgcgtctcggacctggagctcggcgccatcctgatggcctaccgcatcaagggcgaggccccgcacgagctggccggcatgctggaagccgcccatgcgcactgccagccgctgccggcgccgcctgaccggcaggtggtggtgatccccagctacaacggtgcgcgcaagcaacccaacctggtgccgctgctggcgctgctgctggcgcgcgaagatgtccccgtgctggtgcacggcacgcgcctgttcaatggccgcgtgaccagcatggcgctgttcgaggcgctgggcgtgcccttgtgcgcgactaccggcgacgcctcggcacggctgcgcgagagcagcgacctcgggccgctggcggtgctgccggtggatgtgctgtcgcccgggctgtcgcagctgctggagcggcgcaccgtgatcggcctgcgcaattcggcgcatacggtggccaagatgctgcagccggtgggcgagcattcgcccgcggaagggttgcgcctgtacagctacacccaccccgaataccgcgagacgctgaccgactacttctcgcatgaacccgccaacgtgctgctggcacgcggcaccgagggcgaagtggtggccgatgcgcgccgcaccagccgcatcgactggctgcacgaggggcaccagcagacgctggtcgatccggctgttggttcgctggccgaagtgcctgaactgccgcccggcagcgacgccggccagaccgtggcctggatccggcgcgtgctggacggcgcggcgccggtgccggcaccgatcgctatccaggtcgaggccatccgcgaatgcctgcggcaaggcactcgcgtgacctgggccagcccggtctgagccagccccgggaccgctgtcagggcttgcgcgggggcagcgggatgcgctcggtctcgcccggcacgtgcgggaactgatcgtcctcccagcgctgggcggcggcctcgatcgccaccttgctgctggcaacgaaattccagtagatgaagcggtgcccgtcggtcgggtcgccgcccagcagcattacgcgcgacggcgtcgtggccgtcagcgttgcgggctggcccggcgtgagcaccaccatatgctcggccggcagcggctcgccgtcgagcgccaccgccccgtccaccggatagatgccccgctcggcatgatcggccgggatctccacgctcgcgcccgcatccagctcgatcgccacgtacagggtgcggctgaagaccttgaccggagagacctggccaaaggcatcgcccgcaatcaccaccatgcgcacacccggccgctcgatccgtggcagcgtggcggcgggatggtggaaaaacgacggctcggcaccctcatgctcctgcggcagtgccacccaggtctggatgccgtgcaggcgggccccggcggggcgcacatgctcgggcgagcgctccgagtgcacgatgccgtgcccggcggtcatccagttgacatcgcccgggcggatcgcctggtcgctgcccaggctgtctcggtggatgatctcgccctcgaacagataagtgaccgtggccagtccgatatgtggatgcgggcgcacgtcggctccgccgcccggcggcagttgcaccggccccatatggtcaaagaagataaacggaccaacggtctgggtggcggcggcgggcaacagccggcgcacggtaaaatcgcccaggtcgcgcacatgcggcttgagcaagtgttcgatagcagacataactcctccggtggaatgagagaggcttgcaaggatgccagcgcgccgcagcttggtcgagtgtagccgctgctgcaacaaatcattgcagcagcgggcagaacccccgtgcccggcaccgctctaacatccagtgcgccgaaccgtgggtatcgttcccgccgctcgaattgataggtagctatgccagcagcaagagcaatcgagaggaactatcacgaccatcggggctccaattagcactcacccggcctgagtgctaatatgtgttgcagtgccaccgccccaacaggcgcggcaccccggcaaccgaaccgccggatgcgaaaggagccattgagtgaacgcagtcttgtctgccgaccaaaccctgaataaccgtctgccgacggcaccccggagcacgggcagcttcgcgctgaccttcccggccaccgttggcaacctcgacagctatatccaggctgtccaccggattccgctgttgaccgcggaggaagagcagcgcctggcgcgcgagctccgcgaccacgattccgttgacgctgcccgccagatggtgatgtcccacctgcgcctggtggtgtcgatcgcccgccagtacctgggctacggcctgccccacgccgacctgatccaggaaggcaatatcggcctgatgaaggcggtcaagcgcttcgaccccgaccagggcgtgcgcctggtgtcgtacgcgatgcactggatcaaggccgagatccacgaatacgtgctgaagaactggcgcatggtcaaggtggccaccaccaaggcccagcgcaagctgttcttcaacctgcgcagccacaagcagggcgcgcacacgttcacgccggagcaggtcgaggccgtggcgcgcgagctgaacgtcaagcccgaagaagtgatggagatggaaacccgcctgtcgggcggcgacctggcgctggaaggccagatcgacgacggcgaagaggaattcgcccccatcgcctacctggcggacaaccacaacgagcccacccgcgtgctggaagccaagcgccacgaccgcatgcaggtcgagggcctggaagaagcgctgggcaagctggacgaacgcagccgccgcatcatcgaggcgcgctggctgcacgtcgaagacgatggctcgggcggctccacgctgcatgagctggctgacgagttcggcgtctcggccgagcgcatccgccagatcgaggccgcggccatgaagaagatgaagggggcgctgcaggcgttcgcctgatccgcacccccagccatgcaaaaggccggtccactggaccggcctttttgttgcccgcgagagggtgagtgcgaccttatgccgcaccccttcccaccctttcacgtcacgacagcagctgtttcaggtcgtgcgcgatcggatccggaccctggccgtggcggatgaacagccgcagcttgccgtccgggtcgaacacatagctgcccgcggagtggtccaccgtgtagttgttcggggagctgcccggcaccttggcgtagaacaccttgaagtccttggtcaacttctgcagtgcggcttcgtcggccgggcgcagccccaggaagcgcgcatcgaaggccggcacgtactgcgccagcagcgcctgcgtgtcgcgttccgggtcgaccgtgacgaacagcacctgcacgcggtcggcatccgggcccagtttctccatcaccgccttcagttcggccatcgtcgtcgggcacacgtccgggcagtgggtgtagccgaagaacatcaccaccgccttgcccttgaagtcggcgatggtgcgcaccttgccgtgatggtcggtcagcgagaagtccttgccgaagtccgccgcgccggtgatgtcgacattgcggaacgaggccttctgctgcccgcaggcagccacggccagcgcaagcgcggccagcagggaaaagcggcggaaggcggcgaacaggccggaggcggggcttaggcggggcatgcggcggaaaccggtcaggggtgggaggaaacagcggcaccggagggcggcgacatcacgcagtatcgccgatcgtgccgccacgctgcaccggccgcgacaagatgccgcagccggtcggccacaggtcagacctgcggcacgaacttgaagtagtggtcgaccagcagcgcggcgaacagcagcgacaggtacaggatcgagaagcggaaggcgcgctgcgccagctcgtccgaatagttacggtacatcttccaggcgtaggccaggaaacccgcgcccagcgccagcgcggccgccaggtagatatagccgctcatgccgtagacaaagggcagcagcgtcgcggcgatcatgatcagcgtgtacagcaggatatgcagcagcgtgtagcgctcgccgtgcgtgaccggcagcatcggcaggccggacttggcgtagtcggcgcggcggtacagcgccagggcccagaagtgcggcggggtccaggtgaagatgatcagcaccaggaaccaggcctcggcaggtacctcgcccgccaccgcggcccagcccagcgccggcggcatcgcccccgagagcccgccgatcactatgttctgcggcgtggccggcttgagcaggatggtgtagaccaccgcgtagccgaggaaggtggcaaaggtcagccacatcgtcaggtcgttggcgtagacgtgcagcagccacatgccggcgccgcccaggatggcggagaacaccagggtctgcggcgtggtgatctcgccggtggccgacgggcgccacgcggtgcggcgcatcagcgcatcgatcttctgctcgaccaggcaattgatggcaaaggccgcaccggccagcagccagatgccggcggcgccgccgatcagcacgcgccacggcaccatgccgggcgtggcgaggaacatgccgatgatggcgcagaacacggccagctgcgtcacgcgcggcttggtcagggcggcatattgtcgggcaaggtgccgtatccggctcaacttgcccagcgaatgggggtgggtagcggtaaccacggaaggggtcttgtctttcatgtggcgcgggcggcgttcggcacggcagcgggggcgccggcggcccgcatggtgagccctgcgagccctgtattgtagtggaggcggaccagcagcagcaggagcagcgccgcgccgccgttgtgcgcaaccgcggccaccagcggccagtcgaacacgatattggacatcccggtggccagttgcagcaccagcgtggccagcagccagccggccgcgcgcgcgagcccttcaagcctgcgcgcgcgcaggccaagccacgccaggtagcccagcacgacaaaggcaaagccgcggtgcacccagtggatcgccaccagcgccgcgtgcgggatgtagtcgccatcggcggtcatgcccagctggcgccacagggtgaagccgtggcggaaatccatctcgggcaccagctggccattgcacagcgggaagtcggtgcaggccagcaccgcgtagttggtgctgacccagccccccaggaagatctggatcaccagcagcagcaggccgatgcgcaccggccagcgcagccgcgcggcccgcgccgcgaccgggtgcggcggatcgttgcgcgagcccagctggatcagcacggccagcaaaaccatgcccagcatcaggtgcgtgaccacaatgatcggctgcagcttcagggtcacggtgaaagcgccgaacgcaccctgcacgcacaccagcagcagcaccccggtggcgaaccacggcgactgcttcagctcgcgccgcttgacccacgccagcaccatcagcgtgatgatcagcaccccgaccgccatggcgaagtagcggtggatcatctcgatccacgccttggccagcgtcaccgggccgctgggcagcgcggtctcggccgcgcggatcggctccatcgcggcgtgcgggttggagtgcccgtagcagccgggccagtcggggcagcccaggccggagtcggtcaggcgcgtgaagctgccgaacatgatcaggtccagcgtcaggaacgccgtgatccaggcgagcttgcggtatttgttgcggtcccccttcaccagcacgtaggacagcgggaacagcgcgatcaggatgccgatgatggccagttgcagcagcatgccgtcccctttagccgatgcgcgagaccttgagcagcttcttcaggtcgccgctcatcttcttggggtccggatcctgcgggaaacgcatcatcaggttgcccagcgggtcgaccaggaacagggtgtcctcggcgcgcttgccgggttcggccggcagccactgctgcgcggcctggcggtcgatgcgcaggaagcgcacacccgcgtagggctcgttgtaggcggcgttcaggcgctcgtcgatcttgccgtcgtcggtcaccagccacaccggcacgatgcgttcgcggtcctggccctgcccggcgcggatctggcggatggtgaagagcttcttcgcgcaggcctcgtcgcaggcggacgggtcggtggtcaccagcagccacttgccgcggaactgctccagcggcacggcccggccctgctcatcggtgacgcgcaccggcggcatcggccgctgcgggtcgaccagcgcgccgtagttggtggcgccgccacgcggcttgatgacgtaataggtgaagtaagaggcgatcaccggcgacgcgcacaccagcaacagcatcagcatctgcaggcggccacggcgcgtgcgcgcatcgatgcgggtatccggcggcgaggccgcggcggccggggcggagtcttgctgtgccatggagtacgtctgtcctttgtcttcggcgagcgcatgcgcctggttcattcgagttacggtgctgccacccggcgcgcgcggcgccagcccagcacgaccaccagcaccaccgtcagcgcggccagcccgaaccactggaaggcatagccgtagtgccggtccgcgcccaggtcggccggggcccagtcgcgcgccaggccatcgccgctgtcgctgcgctgctccagcaccagcgggtgcagcgccaggccggtttcagccgcataggcagcgaggtccaggttctggcggatcttgctgccggcggcgtcctggcccaggctatagacccgcggcacggccgccagtgccgtgccttcgatcgttacctcgccctcgggcgtggggaacggcgcaatccgggtgcggtcctgggcatcgcgcggcagccagccgcgcagcaccagcaccgcctgcatggcgccggcggcacctgcgggcgccggcgaggcggctgaaatccgcagcggcgtcagcaccaggaagccggcgcggctatccccggggctgctgccattgccgtgggggcgattatccagcaagacggtgcgggccgtgtcaaagcgcccggtcacgcggaccgtgcggtcggtcacaacttgcggcagcggggccgtgcccagcaccaccggcggctgcgccgacagcgcctgcagccgcgccgcgcgcgcctccttgtcgtgcgcgcggttgagctgccagttgcccagcgcgcaggtcacggcgatcatcaccagtgcagcggccagcggcaacgggctggtgcgataatgggtctttccgtcgctcctggccccgacctgccccgccatgcgctttgtcatcatcgttgccttcatcctgatcatcgccagcctggcctccgccctgttcttcatgatgcgcgaccgcggcacgacgcccaacatgatgcgctcgctgatgctgcgcgtcgggttctcgatggcgctgttcctgttcatcctgttctcgaactggatgggctggatccacagcacgggcatccgcatggcaccctgaacgccaggacgcgggcaccaggcccgcaaaagacaaacgccgcaggctggacaacctcctgcggcgtttctcttttgcgttggcgccggcggcccccggggggcgcgccggcgggtacggcagccggatttacagccagtacaccacgacgtagaggaacagccacaccacgtcaacgaagtgccagtaccaggcggcgccttcgaatgcaaagtggtggtcaggcgtgaagtggcccttcagcacgcggaccagcaccacggccagcatgatcgcgcccatggtcacgtggaagccgtggaagccggtcagcaggaagaaggtcgagccgtagatgcccgaggtcagcttcaggttcagttccgagtaggcgtgcatgtactcgtacacctggaagcacatgaagaccgcgcccagcaggatggtcagcgacaggccctgaatcagctggctgcgcttgccggccagcagcgcgtggtgcgcccaggtcagcgtcaggccggacatcagcagcagcgcggtgttgatggtcgggattggccacggacccatggtctggaagctttccaccacgccggccgggccggtgttgggccataccgcggcaaagtcgggccacaggatcttgttgttcaggtcgcccagccacggcatggcgatggtgcgggcatagaacagcgcgccgaagaaggccgcgaagaacatcacctccgagaagatgaaccagcccatcgaccagcggaacgacaggtcgatgttcttgccgtacatgccgccttcggactcgctgatggcgtcgccaaaccagctcttgagcacgaacaggaaccacagcaggccgaggccgcacaggtacggcgcccagggctgcccgtttacccaaccggcggcacccgcgcccgtcatcagcaggccgaagcttgccgtgatcgggtggcgcgacgggcccggtacgaagtagtacggagcgtttgcgcgattcgcactcattcttttatctccagctcagagtctttgattcagtattcgtgatccgcgctttggcactgcgggccgtcccctcctccgggccagccccgccgccgcggttgctttgttctgcgactgcttttgttgtctacccttcctgccctgctatcccgctgcctgccccaccacggtgcgcacgatgagcaccagcaccgcgatgaagatggccgccgcgatcactccggcgatcaccacatgcaccgggttcagccgggccatgtcgcgctcgtgctcggcgcctttgcgcaggccgatgaacgaccacagcaccgcgcgcatggtctgcccgaacgacatcttgcgcttgaccgcgtccttcatctcatccattgcccgtcctcctccgccccggcatgcaccgcggccgcctcagatgcccttgccggccgttgccggctgcggcgccagctggccctcgggcgcctgcgccaccggcgcacccacctcgaagaaggtgtacgacagcgtaatattcttcacatccttgggcagcgcgggatcgatcacgaacaccaccggcatctcgcgcgcctctttcgccttgagcgtctgctgcttgaagcagaagcactccagcttcatgaaatactgggtcgcctgcttgggcgcgtagctcgggatggcctgcgccgaaatatcgcgcggctgtccgttggccacctcgtagacgatcgtcgccatctcgcccggatgcacttccatgctgttcttcaccggccggaaggcgaagggcccgcgcgcgttggagtcgaactccaccgtgatggtgcggctcttgtcgacctgcgtgttcttcaccgcgccgtgcagctcgcgcgtggtgatcacgttgatgccggtgatctcgcagatcttcttgtacagcggcaccagcgcatagccgaagccgaacatcacggccacgatcacgaccaggcgcagcatcatgccgcggttgaaccgcttgtccgcttccctgccagcctgctggtcgatgctcatctcgctaccctgccgcctcagccaagaaacatcatcttggcgaagaaccccagaaagaaaaccaccacgatcgacagcaggatcaggccaaggcgccggttggcggccttctggtccgggcgtgatgggcttttgtctggagactgcatagctgcttctgttgcttgccggcgcgggaggcgacgctgccgcctcccgctgcctgattacgctggccgcgccttagcggacctgcgggggaacttcaaaggtgtggaacggcgccggcgacggcacggtccactccaggccctctgcgccatcccagggcttgtcggcggccttctcgccaccgcggtacgacggcagcaccacgaagaagaagaagtacacctgcatcaggccgaagcccagcgcaccgatcgacgcgatcgcattgaagtcagcgaactgggtcgggtagtcggcatagcgacgcggcatgccggccaggcccaggaagtgcatcgggaagaaggtcacgttgaagaagatgatcgacccccagaagtggatctggccgcgggtttcgttgtacatgaaaccgctccacttcggaccccagtagtagaagcccgcgaacagcgcgaacagcgagccggccaccagcacatagtggaagtgcgccacaatgaagtaggtgtcctgcagctggatgtcgatcggggccacggccggcatcaggccggtgaagccgccgatggtgaacacgaagatgaagccgatcgagaacagcatcggggtctcgaaggtcatcgagccgcgccacatggtggcgatccagttgaagatcttcacggcggtgggcaccgcgatcagcatggtcgcgtacatgaagaacagctggccggtcaccggcatgccggtcgtgaacatgtggtgggcccacacgatgaacgacaggatggcgatcgaggcggtggcgtacaccatcgagctgtagccgaacaggcgcttgcgggcaaacgccggcaccacctgcgagacgatcccgaacgccggcaggatcatgatgtacacctcggggtggccgaagaaccagaagatgtgctggtacatcaccgggtcaccaccaccggcggccgagaagaagctcgtgccgaaatggcggtcggtcagcaccatggtgatggcgccggccagcacgggcatcacggcgatcagcaggtaggcggtgatcagccaggtccagcagaacatcggcatcttcatcagcgtcatgcccggggcgcgcatgttgaggatggtcacgatgatgttgatcgagcccatgatcgacgacgcacccatgatgtgcatcgcgaagatggccatgtccatgcccgggcccatctgcaccgacagcggcgcgtacagggtccagccggcggcggtggcgccgcccgggaccaggaacgagccggccagcagcagcgcggccggcggcatcagccagaagctgaagttgttcatgcgcgcgaacgccatgtcggacgcgccgatctgcagcgggatcatccagttggcgaagccgacgaaggccggcatgatcgcgccgaacaccatcaccagaccgtgcatggtggtgaactggttgaacagctcggggcggaagaactgcaggcccggctcgaacagctccaggcggatcagcagtgccagcaaaccgcccgacagcagcatgatgaacgagaacagcaggtacagcgtaccgatgtccttgtggttggtcgcgaacagccagcggcgccagccatgcgggtggtcgtgcgcgtggtcgtcatgcgcatgatcgtgcggatgggcgagcgcgtccggggtagcagtactcatcgcaaatgctcctctaatcctgttctgtcttcagcgggtcagcccgcgacgcggttgcccgcgaggctggcctgcttgtcagccttgtcggccggcttggcttcggccttcggcgctgcgccgcctgccgcgccgccgccctcggggaacttgcccgcacgggcgcccacgaagtcgctcggctggaccacttcacccgtcttgttgctccaggcgttgcgcgtataggtcatgaccgcggccagctcggtgtccgagagctgcttccacgacggcatggcagccttgccttccagcatgatgtgcatctggccggccttggggccattgaccagcttggagccgtccagcgccgggaaggcgccgccgcccttgccgttgggctggtggcagaccgcgcagttggcggcgtagaccttctcgccacgcaccttcgactcgtccagcgtccaggtcttgttgggatcgtcggccttggccgccagctccttcttcttgccgtcgacccacttggtgtagtcggcgtccgagaccacgcgcaccacgatcggcatgaaggcgtgctccttgccgcacagctcggcgcactggccgcggtacacgccgatcttctcggccttgaaccaggtgtcgcgcacgaagccggggatcgcatcctgcttgacgccgaaggccgggatcatccaggcgtggatcacgtcgttggcggtggtgacgatgcggatcttcttgttgaccggcacgaccagctcgttgtccacctccatcaggtaggtattcgacttgggctgctcgttgttgatctgctcgcgcggggtggtcagggtcgacacgaaggagatgccttcgccttcgcccttcaggtagtcatagccccacttccactggtagccggtggccttgatggtgatgtcggagttggtggtgtccttcatcgccaccacggtcttggtggccggcagggccatcgcaatcacgatgatgaacgggacgatggtccagatcacttcgaccgtgatgctctcgtggaaggcagccggcttggcacccttggccttgcggtgcttgaagacggaataaaacatcacgctgaataccgcgacgaagatcaccgtgcacatgatcaacatcatccagttcagccagtgaatctgttcggcgatcttggtaaccggctcggtcaggttgagctggcgcacggcggggccgcccggcatgtcgctgaccgcggacgccgcctggctggcaagcagggacgcgccggccagacaaactgcggatgccttcttccacattttcatttgttatctacccaatttacagattcaaatctgtccccgccgccgccaccgccgcctctcagaggcggcgcaaggccgctgcgagctcctgcgcgaacttgcgtcgccggtacgggtccacgtgacaccccacctgtacctcacgcccgcccgagcgcagcgtcaccagcgcgcggaacgattcacccagttcgatccgcacccagcgcggattgaattcctgacgcgtcacccgtccggcgctggctgtctccacgaccagcgtgccgtcggtgatgctgacgcgctcatagtctgtcgcatggcgcgcatacaccagcagtgcgatgcccagcccgatcagctcgatgctcgcgaacggcagtacgagccaggacccttgccacgcaaaaaacaacgcgatggcaagcgaaaccgtgaggatcgagaggtaaaaccagccgacctggcgtggactcagcgagcaattccgcttcatcagccagtcgtggggcgcggggggaggtccgtcgagatttccgccggagtcaccacctgccgtctggaatgcgatacccaagtcttgcatcgccaaccactctgcatcggatgcacacccgggacgatggcgtccgggccgcacagtgcaagtgcaaaaccaggacgttcttgtgccaggggaccactgcgacaaactggcgcattatagggcgcttcccatacacggacaagggcgcgccttgaccggacggcttgcgcgctgcttgattctgtgcatagggaagggccccgccatcgccctgcccgccgcgccggcgctatgtttgcggcaatccagcaccggcgcaagttaactctgttttaacttgtccgacgcggccttgcacggccgatctggtccagcggcaccaccgcgcggccctggtcgtcgaccgcctggccgccacgcggggccagcttccaggcgtggccgtagacgatctcgaaggtcagcgggatcacgccgtcggcgttgcgccgccgctccagcgcctgcgccagcgcctggtaccagccgcggccgcgcaggccctgcggcagcgacccgaccggcccgcgcaggccgccgaaggcctgcacctcgcgcagcagcgtggcgggggactcgtaggtcacggtcagcgtctccatgtccatcaccggggtggaccagccgctgtgcaccagcatgtcgccgatatcgtgcatgtcgacaaagcgcaacgtatggggtgcctggtcgacttcggcaaaggccgcgcgcagctccttcagggtgtccgggccgaacagcgagaacagcaccagcccttcgtcgcgcgccacgcggtgccactccgggaacacgcggtgcggctccggatgccagtgcagcgccaggttggaccacagcaggtcgaagctcgcgggcgcaaaaggcagtgtggcaagatcggcctggaccaggtcaaagagcggccgcttgcccagcatgcggccgatccagccgggccggcgctgcgggtcgcgctggccggcctcggccagcatcgcgccggagatgtccagtccggcaatctgcgcatccgggaagcgcgcgcgcagcccggccaggccctggccgtggccgcagccgatatccagcgcgcgctgcggcgccaggcggatcacttccatgcgctcctgcatgcggcggccgatctcgcccagcaggaagtccagctggccgaagccccggctgcgccggtcgaaggcgagccgggtcaggcgcgcgggcggcaggaaggcatcgggggaatcagcggcatgcagggacacgggcagacagggcagcaagaaaaccaggaaccggcgcggggacagatacaggatcaggcccgagcgccggatgaatgcggccgccgcgcccgatgggccgcggccggacggcaagtatacgcgcgcgccgcgctggctgccggcgccgccggcaaggcgctggccggcgccgccgaactgctgctgccaagcgcctgcgcgctgtgcggcgcggtgcagcggcaggtggtctgcgcgccctgtgccgccgacttgctgcgcccggtgcggcgctgccccgcctgcgcgctggcgcaggggcgccacttccactgcccggcctgcgcggcatcgcccccggcctacgaccaagcccacacgctgggcgactacgcttcgccgcaggaccagctggtgctggcgctcaagttcggccacgccctgccgctggcgggttggctcgcggccaggctggccgcgggactgcagggggcctgggcccgacagcccgcgcccgacctgctggcgccgatcccgctgtcgccacagcggctggccgcgcgcggcttcaaccaggcctgggaaatcgcgcggccgctggcgcgccacctgggcctgcgcgccgacccggtgctgctgcagcgccagcgcgacaccggcagccagcgtgcgctggacctggccgcccgtcaggtgaacctgcgcggcgccttcaggctggcgcgcgccgcgcggctggacggcatgcacgtggcgctggtagacgatgtgatgacctccggcgccaccctgcacgaggccgccggcgtgctcaaggcgcatggcgcggctcgcgtcagcgtgatcgtcgcgctgcgcacgccgtagctttggatgacagtggccggtgcgcgcggtaagctgcgcaccgttctgacgaagggcgcagtgcgcccgccatcccccgcatcatgttcaacgtcgtcctggtcgaaccggaaatcccgcccaataccggcaatgtgatccgcctgtgcgccaacaccggagcgcagctgcacctggtcaaacccctgggttttccgctggaagacgcgcgcatgcgccgcgcgggactggattaccacgagtacgccaccatgcgcgtgcatgaaagctgggacgcgctgatggccagcgagcagcccgacccggcgcgcatgttcgcgctgaccacgcgcggctcgacaccgttcggcgaggtggcgttccgccccggggactggttcgtgttcggttccgaaacacgcgggctatcgccggagcggcgcgactggttcccgcccgcgcagcgcatccggctgccgatgcggcccgacaaccgcagcctgaacctgtcgaacacggtcgccgtggtggtgttcgaggcgtggcgccagaacgggttcgaaggcggcagctgagccgcccggccagcgcctactccggctgcacgccggcggcgcggatcaccttgtcccagcgcgccttctcgctcaccatggtctggcgcagcgaggccggcgcggtgccggccggcacgaaatactgcgcgcgcatcttgtcgcgcacgtcggcgctgccgatgatcgccaccagctcgcggtagagccggtcgatcacagcctgcggcgtgcccgccggcgccagcaccgcctgccaggaaatcgcctcgaagcccgggtagccggattccgccactgtcggcaccgacggcaacaccgccgtgcgccccgtcgtggtcacggccagcacgcgcagcttgcccgcgttgacctgcggcatcgcgatcgccggcaccatgaaacccgcctgcacctgcccgcccaccatcgccgtggtgatctgcgggaagccggggtatggcacgtgctgcaggtcgatgcccgccatcgccttgagttgctccatcgccaggtgcgaggcactgccgttgccgggcgagccatagttcaactcacccggcttggcccgtgccagcgcgacgaactcgcgcaggttgtgcaccggcaggcgtgcatccaccaccagcacgttgggcgaggtcgccaccagcgtgaccggcgccagctggcggaacgggtcgtagttcaggttgcgcgacagcgtcggcgcggtcaccagcgggccgttgatggtgaacagcagggtgtagccatccggagcggcgcgcgccaccatgccggtgccgatattgccgccggcgccgggacggttttccaccaccaccggctggcccagcgcggcggccagcttttcggtcacgatgcgcgcgatcaggtcgggcgatgagcccggcgggaacggcaccaccatgcggatcggccgcgcgggccagggttgggcgaagacgccgccggaagtcccggcggcgcaggcggcagccagcgcgatcagcgcttgtcgtcgtgtgggcatgcggtgcggaggatcagaagttggatacgcgagtcatcattcgtcgcgcgcgtcgcgctgcagcagctgcgccaccgcatcggcggcgctcagcccgtcgaacagcaccgcgcagaccgcgcgggcgatcggcatctcgacaccgtaagccgaggctagctctgccacagcctgggcgcagcgcacgccctcggcgacgtggcccagaccggccaggatctgctccaggctctgccccgccgccagctgctggccgaccttgcggttgcgcgacaggtcgccggtggcggtcaggatcaggtcgcccacgccggccaggcccatgaaggtctcgacccggccgcccagcgccagccccaggcgcgtcatttcggccagcccgcgcgtcaccagcgcggcgcgcgcgttcaggcccaggcccagcccgtcgctggcgccggtggcaatggccagcacgttcttgaccgcaccgccgacttccacgccggtcaggtcgtcgctgccgtagatgcgcatcgcatgatggtggaaggccgcctgcgcgcgttcggccagcgacggctcgttgcctgccacggtcagcgcgcacggcagccccagcgccacctcgcgcgcgaagctggggccggtcagcacgccgtaggcaaagccctcggtgcgcccggcggcgtcgagttcggcccgcaccatctggtgcggcagcaggtgggtgccggactcgaagcccttgcacagccacagcatcgacaccggcctggcgccgcgcgcggccagccggcgcgtcatctcgcgcaggcccgccaccggggtggccaccaccacgatgccgtcggcatcgtcggcggcatgcgccacggcctgctcgaagtctgcctgcaccgccagcctctcggacagcgtcacgccgggcaggtaggcggcgttctcacgcgtggccgcgatggccgcgagttgcgcggggtcgcgcccccacagcaccacgtcattggcggccgcggcatggctggcgagggcggtgccccaggcaccggcaccgaggaaggtcagtttcatggcagcttgatccgaggatggacgcagtcgatggtagcccaaaggcaaaacggggccgcagccccgtttcgatgatggctcaggacgccggaatcagtggcgggcctggctgccgtcgggcatcacgatgccgctgttgccgccttcggcaccctgggcttcttccatggcggcctgcaggcgttgctcatacagcgcctggaagttgatttccgacaggtggatggcctggaagccggcgcgggtgatcacgtcagcgatattgccgcgcaggtacgggtacaggatggtcgggcaggcgatgcccagcagcgggtccagctgctccaccggcacgttgcggatatcgaagatgccggcctggtgcgcttccaccaggaaggcaaccttgtcctgcaccttggtcgtcacggtgcccgtcaccaccacctcgaagatcccttcctgcagctgcgaagcgccgacgttgacctgcacttccaccgacggggcttccgattccaggaagatgccgggcgaattgggctgctccagcgacatgtctttcaggtagacgcgctggatgttgaagaagggttgatcgtcctgctgggtgttttgctggtcgctcatgaaaggcttccgggaggatgggctggtgtgcatcgggcgcggcggccgcaatccttgcatcgtgcaaggctggccggtgcccgcttgaaaaacgcatatggtacatgacgcgggtggcgaattcacccgcgccgggggtaagccggaaccagcgcggcgcggaatcagacgattccgcgccagcgccggcgcaaccggctcaggcggccagcagcggcaccaggccgccctggcggtccagcgccgagagatcgtcgaagccacccacgtgggtctcgtcgatgtagatctgcggcacggtgcggcgaccggtacgggccatcatctcttcacgcttgccgggttcgcggtcgatcaggaccttctcgatcgtttccacgcccctggacttgagcaggcgttcagccatcaggcaatacgggcacaccacggtgctgtacatgacgacacgggccatgcgggttctccttgaatgcaatgcgcgcgcggcccggcctggccgggggcgcgccttgtgacggatacggcggtgctgcccgggattacttcaccagcggcaggcctgcctgctgccaggcggcgatgccgccctcgagcgcgtagatctcactgtaaccggcttccttcaacgctgcctgggccttgcccgagcgctggccggtctggcacacgacgatgatgggggcagccttgtcctttgcaaggccggccgcgcgcgagggcaggtcggccagcggagcgctcttggcttgcggcaggtgacccttggcatactcggcgggctcgcggatatcgaccacgaccgcgccgcgcttgttgatcagctgggtcgcggtggccgtattgacggtcttgccgcgggtgctgcgcgagatcgcgggccaggccagcaggccgcccgagaccacggcaagggcgatcagagcgaggttgttgtagtcggcgaagaaattcacgttggcattccggtaggttgggtcggcggcattataaaatacgcggtttggcgtccaggccctgccgtcgcatggccatccgccattgtcgcctgtctgagacatgggatgtccacaaggaacccatcagcccttccaggtgacggcgcggacgcatgcaggttacctactctctggaagcagcagcatgtacaagctcgtcctcatccgccacggcgaatccacgtggaaccttgaaaaccgctttaccggctgggtcgacgtcgacctgaccgaaaccggcgccgaccaggcgcgccaggccggcaagctgctcaaggatgccggcctgggctttgacgtggcctatacctcggtgctcaagcgtgccatccgcacgctgtggcatgtgcaggatgaaatggacctgatgtggatcccggtgcgcaacgaatggcgcctgaacgagcgccactacggcgcgctggccggcctgaacaaggcagaaacggccgccaagttcggcgacgagcaggtgctggtgtggcgccgcagctatgacacgccgccgcccgcgctggagcccaccgatccgcgtgcctcgtacgacgatccgcgctacgccaatgtgccgcgcaatgagatcccgctgaccgaatgcctgaaggacaccgtggcccgcgtgatgccgctgtggaacgaatccattgcccccgacatccaatcgggcaaacgcgtggtcattgccgcccatggcaacagcatccgcgcgctggtgaaatacctggaccagatctcggatgacgatatcgtcggactcaatatccccaacggcaccccgctcgtctatgagctggacgccgacctgcgccccctgcgccactactacctgggtgaccaggacgccatcgccgcctcgctggcggccgtggccagccagggcaaggcacgctgaagcccgcccgggcggccgcgcgcggatgtgcggccgcccaccctgagccgggacgggacaggccctttccaccactcgcacttatactgtccgacaaaccgcccggcgccgggcggccgcagccggcataatccccataccgtacaccagtacttcgagtacacgttcaggcagccctcatgcgcaagaccctcaagaacatcagcctggtttctgtcggcctcgtcgccggcgtgctcgccacgctgcagatttcggcgaccgcccagaattcatcggggcccttgccgcttgaccagctgcggctgatggccgatatcttcgggcagatcaagcgcgagtacgtggagccggtcgatgacaagaagctgctgaccgaagccatcaagggcatggtcgccagcctcgacccgcattcgtcctatctcgacgagaaagacttcaaggaactgcaagaaggcacgcgcggacgcttcgccggcctgggcatcgagatctcgcaggaagaaggcctggtcaaggtgatcaacccgatcgaggacacccctgccttccgcgccggcatccagccgggcgacctgatcacccgcatcgacgacaagcccgtgcgcggcctgccgctggagcaggcggtcaagcgcatgcgcggcgagcccggcaccaaggtcacgctgaccatctaccgcaagagcgaggaacgcaccttcccggtctcgatcacgcgcgccgagatccgcgtgcagtcggtcaaggccaagatgctggacaacaatatcggctggatccgcctgaccagcttccaggaacgcaccatcgccgacctgtcccgcaagctggccgaactggcgcagaagaaccccaacatgaagggcctggtgctggacctgcgcaacaacggcggcggcgtgctgcagggcgcggtcggcgtggctgcggccttcctgccggaagacgccacggtggtgtccaccaacggccaggtgcccgatgccaagcgcgtgtacaaggcgacgtacaacaactaccgcctgtcgtcgctcgaagacgatccgctcaaggacctgcccgcgctctacaagaagatcccgatggtggtgctgaccaacgcctactcggcctcggcctccgagatcgtggcgggcgcgctgcaggatcatcaccgcgcgcagatcatgggcaagaccaccttcggcaagggctcggtgcagaccgtgcgcccgctgaccaacgacaccggcatcaagctgaccatcgcgtactactacacgccgagcggcaagtcgatccaggccaagggcatccgtccggacatcccggtcgaccagaaccccgaaggcgatccggacgacgcgctgatcacgcgcgaaatcgacaccgagcgccacctgcacaacaagcaggaatcggaacagccggaaatgaccgagcgcgagcagcgccgcgtggacgaactgcgccgcctggaagaagagaacgcgaagaagacgccggaagagcgcgagaaggaccgccgcaagaagccggttgaattcggtacggccgacgacttcatgctgcagcaggccatcgcccagctcaacggccagccggtcaagcgctccaagtcgaagctggaaaccaatccgccggccgacaacggcaaggcggccaagccctcgggcaagagcggcgccaagggcgccagcgcaccggcagccaagccggcggtgccggcccccggcaagcagccgccggccagcgctccgatcggcgagccgctgggcacgccgacgggcaaggcaccctgagagcctggggctttgttcaggctgccggtttgctcccctctcccgcttgcgggagaggggcagggggagagggcaggagcgtcaaaggctgagggcggtgggttaacaccgttggctccgggtgatgtggctcctagctaaaccacccctcaccccaaccctctccccatgaggggagagggagaacaccttgcttgggctagctcgggcggctttggagcacccaaaaccgccctccccttcagcactcgagggattacctcatgagcgacgacggcctcaacgacgaacaactgctgcgctactcgcgccacatcctgctggacgagctcggcatcgagggccagcggcgcctgcttgccggccatgcgctggtgatcggtgccggcggcctgggcgcggccgcgctgcccttcctggcctcggccggggtgggccgcatcacggtggtcgacgacgatgaagtcgacctgaccaacctgcagcgccagatcatccacaccaccgccaacgtgggccggcccaaggtggattcggcgcgcgaaggcatgctgcgcatcaacccggggctggagatcgtgacggtgcccgcgcgcgtgggcgatgcagagcttgcccagctcgtcgccagcgccgacgtggtgctcgattgctgcgacaacttcgctacgcgccaggcagtcaaccgcgcctgcgtgcgccacaaggtgccgctggtgtcaggcgcggcgctgcgcttcgatggccagatcagcgtgttcgaccggcgccagcccgacgcgccctgctacgcctgcctgttcccgccggccgaacccgcgccggaagtggcctgcgccaccatgggcgtgttcgcgccgctggtcggcatggtcggcaccgtgcaggcggccgaggcgctcaagctgctcgcgggtgtcggcgagagcctggcgggccggctgctgatggtcaatgcgctgtcgatggaatggaccacgatgcggctggcacgcacgccggattgcccggtctgcgccgggcactgaatcggcagactagccccgctgcgccgtgtgcgcccgcagccagtcggtgactgcggcgcggtcaccgcgaaagacgatgcgcgcctcgcgctgttcgcgctggaaggcgtacatcggatcgtagtactcgcgcagcagcacttcgatccagccgcggtgcagatccacttcgccccgctccgcctgctgcgccagcgcctggtccagcaacgccgacagcttgccgtagcgggcaccgcccagccgcggcgagatcccggccatggcctcgcgcaggcgcgtggcgtaggcttcgaagccttccgtgctgcccttctcggcaatgaactccgccgccagcccctgcacatagtcgcgcagcacgcgctccacgcgttcgtcgaacgacgcttccagccacaccagcgggctggcctgcatgcgctgcgtcagcacctgcggcacgtcgcggctgccgataaagcggccctcgtcctccaccagcagcgcgcgccagcctgcgtcaatatgccgcagcacgtcgatggccagcgcgttctcgaaatcgatctgcggcggctgcgccagcgcgcgccggccgaaggccgagccgcggtgccgcgcatggccttcgaggtcgatcgcggcgggcacgtcggccagcacatcggtcttgccgctgccggtcaggccgcccagcacaaaccattgctgctcggccgccgcggcatcggtggtctcgatcaggaagccgcgcatggccttgtagccgccggtcacgcgggggtaatcgacaccggccgcatgcagccattgctgcaccagctgcgagcgcagcccgccgcggaagcaatacaggtagccgtccggatgcgcgcgcgcaaactccgcccaggctgcgatccgcgcggccttgcgcagcccggacaccagctggtggccaagttcgattgccgcctgctggcccttctgcgcatagcacaggcccacctcgtggcgctcggcatcatccatcagcggcaggttgaccgcgccggggaaggccccgcgcgcgaattccagcggcgcgcgcacgtcaagcatggccacgccgctgaggaacagggtgcggaagtccgcggtgtcagggcgcatcattaatcgtagggtgagatttgcgcggcgccgtggcgggacaggagcctttgcccgccagggacgcctggataaagaacaggaatcggaatgagaagagttactgcctgcaggcgagcaacaaggcggagccgaacggcgccgcgcgctggggcggccgctcatcgagagcggccacgccggaaaccggcttattgctcgcccggctccatctgcgactgcaggtagttctgcagcccgaccttgtcgatcaggtccagctgcgtttccaggtattcgatatgttcctcggtatcggtgaggatatcgaccaggatttcgcggctgacgtaatcgcctacggattcgcagtaggcgatgccttccttgacggtggcgtgcgcggtctgctccagcttcaggtcgcacttgagcatctcgggcgtgtcttcgccgagcagcagcttgtgcagatcctgcaggttgggcaggccgtccagcatcaggatgcgctcgatcaggcggtcggcgtgcttcatttcgccgatcgattccttgtactccacgtcgccgagcttcttcaggccccagtggcgatacatgcgggcgtgcaggaaatactggttgatcgcggtcagctcattcttgagctgggcgttcagatgctggatgaccttcttgtcacctttcattggcggctcctgttgcaccgggcccgcgcaaaaacacgaaacggcgccaatggcgccgtgcagtcagtgaaaaaggaaaaagcgcaaaagcgcgccgtgaactggtcttcagttcatgggcgcgttcaggccaccagcgccttgcgctggtcgttcgcgactgccgggtcccgagtgtccattatggtacatgggcccgacgcggaacaggaagaaatctccacaacctggatgttggcgagggtcgcaacggtgacattgcgcaccgccgccacgccttcctgcaacacctggtgcgcgcactcgcggcagcggccgcagcaggtgccgacgccaagcgtttcggccagttcgtcgagggtttcgatgcccaggtgcgcagcaccgtgaatctcacgatcggtgatctggttgcagatgcagacgtacacaagtccctccgttggggcgcgtggcaccggcatgccactgcgaatgaacgtcagaatatcagagatcaataatgataacaattcccattaagccacattgggagaggtcgggtagacgccacaggatgcaaaaggaaggcggctgaggcggcactttccggcctgcagaagtgctgcaccagccgcctttccgcatcagaaaaccctgatggcctcagggtcgtgccagctgccgcagggcggccgcctgctcctcgggatcgaaggcctgcaggacctggtcgaccagcggctcgagccgttcgcagtgggcatgcaggatctcctgcttgacccgcagcagctgcgccgggtgcatcgagaactcgcgcagccccatgcccagcagcagccgggtcatggacgggtcgcccgccatttcgccgcacacggccaccggcacgccggcgcggttggcctcgcggatggtgcgcgccaccagctgcagcaccgccgggtgcagcgggtcgaacaggtgcgccaccgcgttgtcggcgcgatcgatggccagcgtgtactggatcaggtcgttggtgccgatggacaggaagtccatcttgcgcaggaacagcggcagcagcagcaccgccgccgggatctcgatcatggcgccgaccttcatgcccgggtcataggcctcgccgcgctcgtcgagctggcgcttggccttggcgatcagcgccagggtctggtcgatctcgctggcatgcgccagcatcggcaccagcagccgcaccgggccgaaggccgaagcccgcagcagcgcgcgcagctgggtcaggaacatgcccggctcggacagcgaccagcggatcgcgcgcaggcccagcgccgggttcagcgcggtctcgaattcatcgccgcgggcatcgagcggcttgtcggcgccgatgtcgatggtgcggatagtcaccggcagcccgtgcatggcatcgaccgcgccgcggtaggcctggaactgctcgtcctcgcccggcaactcgtcgcgccggttcatgaacaggaattcggaacggaacaggcccacgccgaccgcgccggccgccagcgccgcgccggcgtcctcggccatctcgatattggccagcaggtcgatttccagcccgtccagcgtcaccgccggggtatgccgcagccgctgcaggcgcttcttttccagcgcgcgctcgctctgccggtggcggtactcttccaggatgatggcggtcgggtcgacgatcaccagcccggcatcgccgtcgatgatgatccagtcgtcctggcggatcagctcgctcgcgctctgcacgccgaccgcggccgggatgtccaggctgcgcgcgacgatggcggtatgcgaggtgcgtccgcccatgtcggtgacgaagccgtggaagacggtatggcggaactgcagcatgtcggccggggcgatatcgtgggccaccacgatcaccccggtcgcggcctcgccgtcggcggccagcgccggcaccggcgcgggcaccagcaccggagccccggcgagcgccttcaggatgcgctcgaccacctgccggatatcggtcttgcgctcgcgcaggtattcatcctcgatctcgtcgaactggcgcatcagctcttcgaggcgcgtggtaagtgcccactctgcgttgtagcggcggccccggatcagggcctcgggctcgcgcgccagcgcctcgtcgtcgaggatcatcgcgtgcacgtccaggaatgcgcccagctcctcgggcgcatcgcgcggcaggtcgcgcttgagcgcggccagctccgcccgcaccgcggcgcgcgctgcgcgcagccgttcgacctcggcgtcgagctggtcttcatcgaccaggtagtgcgacacgtccagcgccgcgggcgcaagcaggtgcgcgcgcccgatggcgacgccgcgcgagaccgggatgccgtgcagggcgaaaggcatgtaccgctccgtcaggaacgtttaagaattcgggtcgaggccgccggcctcactctccctcaccaaagcggttggcgatcagcgccagcagcgcgtccatcgcctcctgctcgtcggggccgtcggtctcgagggtcaccgtcgagccgatcccggcggccagcatcatgacgcccatgatgctcttggcgtcgacctggcgaccattgcgggacatcttgacctggctgacaaagttgccggcgagctgggtcagcttggcggacgcgcgcgcatgcaggccgagtttattgatgatggtggtgtccctctgcagcatatttgtcgggatggtttgcggtttggttctggacagtcgtggtgccgacctgcagcacaccctgcgagccgccggccagggccttggtggcaagctggtcgagcttttcgccgcggtagcagatcgcgcgcacgagcatgggaaggttgacgccggccagcacccgcacgcggcccggctcggccaggcgtgcggcaatattggcgggggtggcgccgaagatatcggtgaggaccagcgcgccgttgtcctcgcagatggccgccagccggcgcctggcctcggccagcacgacggcggggtcggcatcgggaaggacgtcgatggattccagccgctgcggctggccgcagtagacgtgggcggcgcaatcgcgcagcgccgaagccagcggggtgtgcgcgatgatcagaatgcctgccatgatggtgaatccgttggattgccccgattgtagcaggcggccccccgcgctcccgctgccggccaggctcagcgcccggccgcgtccacggcgtgctccagcgcgtcgatgaacatcgccgcgacatggaagccggtttgctgggtgatctcctggaaacaggtcggactcgtcacattgacctcggtcaggtagtcgccgatgacgtccaggcccaccagcagcaggccctgctcccacagccccggcgccagggcctcggcgatctcgcggtcgcgcgggctcagttcctgcgcgcggccggtgccgccggcagccaggttgccgcgcacctcgccggccatcggcacgcgcgccagcgaatatggcaccggcacgccgccgatcagcaggatgcgcttgtcgccgtccttgatcgccgggatatagcgctgcaccatcagcgtgcgggcgccgtcgtggcccaaagtctcgacgatcgcggccaggttcatgccgtccgcgccgacgcggaacacgcccatgccgcccatgccgtcgagcggcttgacgatgatgtcgcggtgctcggcgtggaagtcgcggatgcgtgccaggtcgcgcgtaaccagcgtcggcgtgatgaattccgggtactgggcaatcgccagcttctcggaatggtcgcggatcgcgcgcggcttgttgaacacgcgcgcgccctgcgcctcggccagctccagcagccaggtgctggtgacgtactccatgtcgaagggcgggtccttgcgcatcagcaccgcgtcgaatgccgacagcggctccagcgcgctgttgccttcgcggtaccaggcgtggtcgtcgccggtcaggtgcagtcgcgtggccatggtctcgaccacacggccggacagggtcagttgcggctgcaagcaccagtacagctcgtggccgcgcgcggcggcctcggtcatcatggcgtaggtggagtccttgtaggtcttgaaggtctccagcgggtcagtgatgaagaggatgcgcatggggctcgtcacaggatcgggttcgggtcggttttctcgagttccagggacgccgccagcagcgccaatcgcgccaccacgccgtacatgtagaaccggttaggcaccgccgcgccgggcttggcgtgggagtcggggataccgttgggcgcaaacgccagcggcacgaaatgcatgcccggcgcgttcaggttctcgtcgttgccgcggcccgtgtgcacgcggtagaagccgccgaccacgtagcggtcgatcatgtacaccaccggctcagccaccgcttcattgaccttctcgaaggtgtgcacgccttcctggatgatgacgtcgctgacctcaaggccttccttgacgacgctcatcttgttgcgctccttccggttcaggcccttgacctcggacggatcgcgcacggtcatgatgcccatgccgtaggtgccggcatcggccttgaccaccacgtacggggtttccttgatgccgtactcgcggtacttcttggcgattttcttgagcacgccctcgaccgcgtcggccagttcttcctcgcccacgcgctcgtggaagtccacgccggagcagcgggcgaagtacgggttgaccatccactggtcgatgtcgatcagcttggcgaacttcttggccacctcgtcataggcggcaaagtggctgctcttgcggcgcgtggaccagccggcatgcagcggcggcagcaggtactgctcgttgatgttttccaggatcggcgggatgccggccgacaggtcgttgttcagcaggatcgaacaggggtcgaagtccttcagccccagccggcggcccctggtgcccaggcgcgcgagcggctcgaccaccagggtctggccgtccggcagctcgatcggggtcggttcggtgatttcctcggagagcgagcccaggcgcacgttcaggcccgcctggcgcatgatcagcgacagccgcgccacgttctgcaggtagaacatgttgcgggtatgccgctcggggatcagcagcaggttcttggcgtccgggcagatcttctcgatcgccgccatcgccgcctgcaccgccagcggcagcatttccggggccaggttgttgaatccgcccgggaacaggttggtgtcgaccggcgccagcttgaagccggcgttgcgcaggtccaccgagcaatagaacggaggggtatgctcctgccattccagcctgaaccagcgctcgatggacggcgtggcgtccaggattttcttttccagttcgagcagcggaccgttcagcgcggtgatgagatgcgggaccatatccatcctataaatcgtcgtcttaatcgttcgccccgattgtagaggaacggccaaccaggcgctggcacaccccttataaggatatgcatggccgggcctgagggataacgatatggggatgggcggcgcgaaataaagagccggccgcaccggcaaaaaaaaagcgcggcaatgccgcgctcttaaatggcctgacagatacggggagcgttctgcaggtggaggaaactgcctcactggcaatgtatgtgccccgcacattaaagacaattgaagctttttaagatcggagttaagcactttgcgaaaagcccgcgcagcgcgcgggggaatcgccagccagcccttgccggcgctcggctggcggattttgcgaggaagctcggaaatccccccgaagcattcgcggcacgcgttgttcggccatggctgaccgccaaatgtatgcaatctcaggcaatgccggaaagaaaaaagcccggcacgcggccgggcgaaaactcctgagagaagattcccaatcagctctccagcacaacacttttgcgctcagacttcatacgcggtctcgccgtgcgaggtgatatccaggccctcgcgttcttcgtcttccggcacccgcaggccgatcagcatgtccaccagcttgtaggccacgaaggcgaccacgccggaccacaccacggtggtcagcacgccttcgaactggatccacagctggccggcgatcgagtagtcgtccgccaccttgttggccacgtagtcgtagatgcccgtgccgccgaggctgggcgcggcaaacacgccggtcagcagcgcacccacgatgccgcccacgccgtgcacgccgaacacatccagcgagtcgtccatgcccagcatgcgcttcaggccggtcactccccacaggcacagcaggccggcgatcaggcccatcacgatcgagcccatcgggccgacaaagccggccgccggggtgatcgccaccaggccagccaccgcgcccgaggcgccgcccagcatcgacggcttgcctttgccgatccactcgccgaaggtccacgccagcactgctgcgcaggtggccagcagcgtgttgacgaaggccagcgcggccgagccgttggcttccagcgccgagccggcgttgaagccgaaccagccgaaccacagcagcgaggcacccaccatggtgaaggtcaggctgtgcggacggatcgcctcacggccgaagccgatgcgcttgccgaacatgtaggcgcccaccaggccggccacggccgcgttgatgtgcaccacggtgccgccggcgaagtcgagcgcgcccttctggaacagccagcccgacttggcggtcgcggcggcgccggcagcagcgtcggtgtaggcgtccggacccggccagaaccagaccatgtgggccatcgggatgtaggagaaggtgaaccacagcaccacgaacaccagcacggccgagaacttggcgcgttcggcgaaggcgccgatgatcaggccgcaggtgatgcaggcgaaggcgcactggaaggcgaagtagcccagttccggcaccaccacgcccttgctgaaggtggcggccacggcctcgaccgtcagccccttcatgaagagccggtcggtgccgccgaagaaggcgttgccctcggtgaaggcaaagctgtagccatagatcgcccacagcagcgccaccagcgagaagatcaccaggcactgcatcagcaccgacagcatgttcttggagcgcaccaggccgccgtagaacagcgccaggccgggcagcgtcatcaggatcacgaaggcggtcgagaccagcagccaggcggtgtcgcccttgttgggcaccggtgcggccggcgcggcggccgcttccgcgggggcggcggccggtgcggccgcggcggcagccggcgccgaagcttcggcagcggctgcagcgggggcggcggaggcggccggggcagatgcctcggcggccggcttgtcctgtgcggcggccggcgtggagatgcccacgcccgccgtgccgatggccagcgccatcgcgccggccgtcaggaatcgcttgaaccaggttttcatgtgcttaacctcttgtgatgtgctgtctcgggtcacagggcatcgccgccggtctcgccggtgcggatgcggatgacctgctcgatcggtgccacgaagatcttgccgtcgccgatcttgccggtgcgggccgatttctcgaccgcctcgatggcgcgctcgaccacgtcgtcgggcaccgccacctcgatcttcaccttgggcaggaagtcgacgatgtattcggcgccgcggtacagctcggtgtggcccttctggcggccgaagcctttcacttcggtcacggtaatgccggacacgcccacgtccgacagcgcttcgcgcacttcgtcgagcttgaacggcttgatgactgcgatgatgagtttcatccgatttctcctcggggcaggccggcgctgcctgcccggcctgcggcaatgattagaaagtcttggtgatcgaggcccaggccgtggccttgcccaggtagcggccgcggttggcgctggtgtaggccacttccttggcgttggtgtcgacataggcaaccgccagcgcgaagcccttgcccaggtccttggtcaggccgatcttccagtcggtgtacgaggcgtcgctgttgtgcttgacgtcctggtagccgacgtgcgcattcagggtcaggtcccagaagttcagcggcacgttggcgctcaggtcgatgtagccgctgttcttgctgtcggcccagccaaacaggttggtgaccgagtgcgagtacttcaggaacaccgggccccagccgatgccggcgtacagctcggtggtgtacgggcgcgggttgttgtagccgcccgggtagtagtactcaagcacgcccaggtcatagctgaactcggtgccggcaaccttgaaggtgttcttgaagccgccgtagaaatccatctcgaccggggccgagaccgccgggttggcatcctcgagccagctgatgctggagttccagttgcccagatagaagccgctttcgtgggcgtagtcaaagccaccctggatggccgggcgcaggttggtctggctgatgccgcgatagcggtagtccgagaccagcgacacgttggccgtgaacgtatgcggcgatgccggctcggcagcggcggcggccggtgccggggccgccgcgtccgtgctttgcgcgtgggcggtggcggcggcactggtcaggacaagcgcgctgactgcaagggccaacttcttcatgggtttcttctccttttttcctgaggctcggatttcgtttcttggatttcggtgattcaatgacgctggcgcaccaactactgcaactgccatgccagctcttcggaaatcggcggcccatgttggccgtgatggcgtgccgtgaccaaagccagacttgaatctgccctgcagcgaagccagatcaggttaaaaggtgtgaacgcggatgcgccggagctttcgcccacgtgcctcacgggcgataattgagtcctgacggtggccgcgtgcgcgacacccaggccgcgcgcccgcaatcggggcgcccaattcctgtgcgaaagcgcgctaaacgccagatgcccacccggattggcaccagttaggtgcgcaaaggagaaaccatgaaaccgaccgatctcttcaacgacctgcagaacaaggtcagcgaggcgctgcgcaactcgccggcaagggacatcgaaaagaacgtgcgcagcatgatgacccagggctttgccaagctggacctggtcacgcgcgaggaattcgacgtccagtcgcaggtgctggcccgcacccgcgcccgcctggaggaactggagggccgcgtggcggagcttgagcgccgcgccggcatcacgcccggcgccggctcggtggactcgaccgggggcgcgtgagcacgccggtcctgcccgatccaacccgccgcctgaaggccgccactcctggcggcctttttcgttaacagttcgatgacatgagccttgccgtcctacgcagccgggcactgaccggcatcgccgcgccgccggtgcgggtcgagacccacctcgccaacggcctgccggcattcaccatcgtcggcctggccgacaccggcgtgcgcgaaagccgcgagcgcgtgcgcgccgccatcctcaacagcggttacgagttccccaaccgccgcatcaccgtcaacctggccccggccgacctgcccaaggaatccggccgcttcgacctggccatcgcgctgggcatcctggccgccagcggccagatcccgtccgaggcactggatgctcatgagttcgccgccgagctgtccctgtccggcgaactgcgccccgtgcgcggcgcgctggccatggccatgggcctggcgcgcgacaacgccgcccgcgccgccgccggcgaggcgccgcgcgccttcctggtggccgcaggcaatggcgccgaagccgcgctgatcgaggacctggcggtgcatgccgccgcgacgctgcgccaggcgtgcgaccatctctgccccctgcccgacgcgcggctgccccgctccatgccggcgttgctgcccgccgccacggaccgcggccccgacatgcgcgacgtacgcggccaggcccaggcgcgccgggccatggaagtggccgccgccggccagcattccgccctgctggtgggcccgccgggcaccggcaagtcgatgctggcgcagcgcctgcccgggctgctgccgccgatgacgctgcaggaagcactggagtccgccgcggtcatgagcctgacgccgggcggcttccgcaccgcgctatggggccagcgcccgttccggtcgccgcaccatacggcatcggggccggccatggtcggcggcggcggcaacccgcgcccgggtgagatctcgctggcgcaccacggcgtgctgttcctggacgagctgcccgaattcgaccgcagggtgctggaagtcctgcgcgagccgctggaatccggccgcattaccatcgcccgcgccgccggccacgccgacttccccgcctgcttccagttcgtcgcggcgatgaacccctgcccgtgcggctacctcggccatcccgaccgcccctgccgctgcacgcccgaccaggtgcggcgctaccagtcccgcatctccggcccgatgctcgaccgcatcgacctgcaggtggaagtcccagcgcaggaccagggcgagatgctcgacggcccgcctggcgaacccagcgccgtggtgtgcacccgcgtgctggccgcgcgcgagcgccagctggcccggcagggcaagcccaacaatgaactgggcggacgcgagatcgaacagcactgcacgatggaagcacaggcgcaggcactgctgcgcggcgcgatgacgcggctggcgtggtcggcgcggtcgtactaccgcgtgctgaaggtggcccgcaccatcgcggacctggaaggtgccgaggtgctgaccgccacgcatgtgggcgaggcgatccagtaccggcgggcgttgcggatggcgggcggttgaatgcctcggcctaagctacaagcgaagccagcgtcgcagcccgcgttcggtcagccgcatcacgcctcctcagaccactgcacgccttcgcgcgccatgaacgccgacgaagccgccgggccccaggtgccggcggtataggggcgcgggccttcgtcctgctggcgccacgcttccaggatcgggtcgacccaggtccaggcggcctgcagttcgtcgcgccgcacgaacagcgccagccgtccgcgtatcacgtcgagcagcaggcgctcgtaggcttcggcgcgccgggtggtgaaggccgagtccaggttcagcgccaggctcagcggcttcagcttcatgccctcgcctggctgcttgaccatcagcgtcagccgcaccgactcttccggctgcagccggatcaccatgcggttgggctgcagcgtgctgccggcatcgaagatcgaatgcggcacctcggcgaagttgatcaccacctcggtcacgcgctcctgcatgcgcttgccagtgcgcaggtagaacggcaccttgttccagcgccacgtgccgagctcggcgcgcatcgcgacgaaggtctcggtgcggctgtctggcggaatgccttcttcctgcaggtagccgcgcaccagctcgccggcgatggcgcccgcggtgtactggccgcgcacggtattgcggcgtacgtcctcgggcgacatcggccgcagcgagcgcagcaccttgagcttctcatcgcgcaccgcatcggaggtgagcgctgccggcggctccatcgccaggatgctgaccagctgcagcaggtggttctgcaccatgtcgcgcatggcgccggcctcgtcgtagaagccgccgcgcgtgcccacgcccacggtctcggccacggtgatctgcacgctgcgcacgaacggcgtgcgccacagcggctcgaagatcgaattgccgaagcgcagcgccatcaggttctgcaccgtttccttgcccaggtagtggtcgatccggtaggtgcggtcctcgctgaagtagcggctgaccacctcgccgatgccgatggccgaggccaggtccacgcccagcggtttttccagcaccagccgggtgtcgttggcgatcaggccatggctggcaaggttgtcgcaggtggccgcgaacaagcccggcggcatcgccatgtaatagatgcgcagcgcctcctggcgcagttgcgcggccagcgccggatagtccccggactgcgacgcgtcaacgtgcacgaaatccagccgctgcaggaaggtctgccatttggccggctcgagatagcgcgcttcgacaaagggttgtgcgctttcatcggcaaaattgacaaaggcctcgcggtcccagcggtgccggcccacgccgatgatgcgggtgccgtcgggcaggttgccgtcgcggtggcacatgtagagcgatggcagcagcttgcgtgccgacaggtcgccggcgccgccgaagatgacgaggtccagtggccgcgcgtcggcagtgccggaagaagaggcggttcgggtggtttgcatgacggactccttgcttgccggggcggcatggggcggtattggggcggtatgggccggctcagcgcgtctcggtcaccttgcgcaggtactgcggctggtcgggattgcggccgcgtgccagcgccagcgcctgcgccgcgacatagaagccctggatggcgcagaccggatcgagcagcggatggccggccggcaccagcggcaactccaggggcagctccgcatcaaccgtgccaggaggcgccgccagcagcacgcgcgcaccgcgcttgcgcatctcggcggccagcgccagcagtcccgcctgttccggtccgcgcggcgcgaacaccagcagcgggtagccgtcgccgatgatttccatcgggccatgccgcacttcggcgccggagaaagcctcggcctggatgccggaggtctccttgagcttgagcgccgcttcctgcgcgatcgccaggcccgcgccgcggcccagcacgatcatgcgctcgacgtcgcgcagcgctggcaccagcgccgaccagtcctgcgcggccgcttgcgccagcgcggccggcaagcctgcgcaggcatcgaccagttcgtgctcgccgctgcgtgcggcctcgagatgccccaccagcagcgccgacatcgacagcatggcgatatagctcttggtcgcggccacgctctgctcggggccggcaagcaggggcagttcatgcgcgcacgcctgcgccagcggcgaatcgggcgcgttgaccagcgccacggtggcggcgccgcggtcgcgcagcgcttgcatggtctcgaccaggtcggggctgcggcccgactgcgagaacgccaccgccagctgcccggccacgcgcagcgcgctgtcgtgcagcgtcaccgtcgacatcggcagcgaggccaccggcacgcccagccggcgcgtgaccagcgtggcgaagtagctggcggcatggtccgagctgccgcgcgccacggtcagcgccgcgggccaggcctgcgcggcgagttgcgcagccagcgcggccacgcgcggcgcctgcgccaactgcgcggccaccacggccggcgcgctcagcgcctcttcaagcattctcgacacagcattctccttcgacataaacggtgcgcaccaagagcgcgcggtccagcacgaccgcgtcggcccagcagccctgtgccagcatgccgcggtcggacatgcccaggtactgggccggatacagcgaaacgcgccgcgacgcatcggcgaggtccagcccgatcgacacgaagttgcgcagcgcctggtccatggtcagcacgctgccggccagcgtgccatcggccaggcgcacgctgccgtggaccttgtagacggtctggctgcccaggtggtacacgccgtccggcatgcccgcggcggcggtggcgtccgtcaccgcatacagccgcggaatcgcgcgcagcgcggcgcggatcgcgcccggatgaacgtgcagcaggtcggggatcagctcggcaaactcggcatgggccagcgctgccgccaccatgccgggcgcgcggtgctgcagcggggtcatcgcgttgaacaggtgggtgaagccgctggcgccggcatccagcgcggccaccgcgtcctcataggtgcccagcgtgtggcccagctgcacgcgcacgccgcgcgcgaccagcaggcggatgatgtccagatgccccggcagttcgggcgccagcgtcaccaccttcagcggcgcggcgccgaggtactgctccagttcttccggcgtggcagtggccgaggtatcgggctgcgcgcccagcttgccggggttgatatacggcccttccaggtgcacgcccagcatgcgcgccgcgccgggcgggcgctgcgcgcaggcgcggttcagcgcctgcagtgcgggcagcagcacgtcgtgcggcgaggtcatggtgctgcccagcaggctggtggtgccaaagcgcacatgcgcgcgcaggatcaccggcaccgcggcctcgccatccatgaagtccttgccgccgccgccgtggttgagcaggtcgacaaaccccggcagcacgtacggggcatcgttgtgctcaggcgaggcgggcacgccctcgatgcgcgcgatgcgtccgtccgggccggcatggatctctccgaagatccagccggccggcgtcaggatgtttcctttcatggcaatactctccaatacattcagatcaccggccagccaccgtcagaacaggtggatgatgccggcataggcgccctgctggttcgccccggcgcccggcatggtgtccggcgacgcctccaccgagaaggtggcattgcgcgagttgaacaccgacgccaccgtgccatacagcgaggtgcgcttcgacaagtcatactttgcgcccagtgtgacaagcgtgccatgcccgccgccattgttcagggtggcgtagtagacgccggacagcagcgtcagcgccggcagcaggcggtagttggcgccgacccatgccatctggctgcgcgtggcggcgtaggggttctccggcgtggccacggtatcgcccgaggacacggtcaggttatagccggcgaacaggcgcaggttgttcagcgcatagctgccaccgagcgtgtactggcgcgagttgacatacaggttgtccatgcggccctgcgtgtcgcgcagttcctcgtagatgccggtcaggctcaggttgccctgcgcgtacttgacggccgcgctcaactgcttgccgctgttgaagctgcccgccacgccgtcgctgccggcctgcgcgcgcacactcagcccgccccacaccggcgagttgtaggtcacggcattggtgcgcgagccccagttgcggccatagaccagcgtcgcgaccgagctggcctgcaggcccatcgggtcgatcgcgccgctctcgtcgtcggtcaggctcatggcccggcccagcagcagcgtgccccagtcgttactggccaggcccacttgcgcgcgccggttgaacagcggatcggagcgcccggtgccggaggtgatcatgccctccaggttgaagaccccgcgcaggccgccgccaaggtcttctgcgccgcgcatgccccagaagctgacgccgtactggttgctgccgaagcggaaggtgtccacgtcgccgcccgggcgggcgatgccgttgacatagtcgaggccggccacggcgcggccatacaaggtgatgccggtgccggcggactgggcgcaggcgcccccggccgacgctgcgagcagcgccgtcagtgcaatgcgtttcacgatcaatgactcctggataagcagacggtatccaccggcgcggctgtcgtcgcggccgtcgttgttgttgccgatggggaaggtcgaccgcagccgcacggctgcggcggcgggggtcaggtgggcatggcctgcagggcgcgctcgaaggcggcagcgtgtccgtctgccgcatggccgaaggcgatatgggcggtgtcatcgccgatccacatcagctggctgcccgcaaggtggtcggcgcgcacccgggcgcgctcgcgcaccaccacgcgcagccgcgtcagtgccaccacgccgaccgaggcgatattggcggcgccgcccagcgcatcgatccaccaggcgggatcgaaagcaccggcagccggcacggacgcctgggtagcaacggcgggcgcagcagccaccacggccgtggcctgcggcgcctgctgcagcaccgcgcggatatcaccggcaacctgctcggcctgcggcccgatcaccacctgcaccacattgggcgggcgcttgagcacgccgcgtacgcccagtgccttgagccgcggctcggacaccgcgccgatgtcggccacgttcagccgcagacgcgtggtgcaggcatcgaccacgaccaggttggcagggccgcccagcgcttcgacatactgttgcgccacgctgcccgcggccggctgcgcggcaccgccggcggccgccacgggcaccacttcatcgcggcccggcgtcagcaggttgaagcggcggataaagaagcggaacagcccgtaatagaccagcgcataggccagccccagcggaatcgccagccagccgcggctggacagcccgtagcccagcacatagtcgatcgcgccggccgagaaggtgaagcccagccggatatcgagcgcatggcacagcgccatcgacaggccggtcatcagcgcatgcaggccgtacagcaccggcgccaggaacatgaagctgaactcgatcggctcggtgatgccggtcaggaacgaggtcagtgccatcgagaacagcatgccgccaaccagcgcgcgccgcgccggcggcgtctcgtggtacatcgccaggcaggccgcgggcaggccgaacatcatcaccgggaaaaagccggtcatgaacaggcctgcgccggggtcgccggcaaagtagcggtgcaggtcgcccgataccgccgcccccgtggccggatcggcgtagttgccgaacacgaaccacgccagggtattgatcaggtggtgcagcccggtgaccagcagcagccggttcagcagcccgaacaccaaggcgccggccgagcccgccgtggtcagccacgcgccggccgcgttaatgccggcctgcaccggcgcccacgcataggccagcacgatgcccagcagcaggcagcacagcgcggtgacgatgggaacgaagcgcttgccggaaaagaagcccagatagggtggcagcgcgacattgcgatagcgattgtagagcccgcccgccaccgcgccggcgacgatgccggccagcacgcccatgtcgagcgatttgtcgatggtcttcagcaccgtggtcagcaccaggtagccgatggtgccggccagtgccgccgcgccgttgttgtcgcgcgcaaagcccaccgccacgccgatcgcgaacagcagggccaggttggcaaagaccgcgttgccggcctcggccatcagcttgatgtcgaatacgtcgggctggcccaggcgcagcagcaggccggccacgggcagcacggcaatcggcagcatcagcgtggcgcccaggcgttgcaccctgggcagcaggtccatcttcattggcgttctccgaatctgtgcgcgcgtggcgcgtattgggttgtggtcgaccggcgcttatgccggccagtagcggcggcacgcgtcgcgcaccgcggcggctgacggcagccgcaacaattcgcctgcgcgctgccggcaatcggcatgcgagagcgcgcgcacgcgcgccttgacgcccggcaccagcccggcgtcgactgacaactcggtcacgcccagcccgaccagcaccggcacggccagcgggtcgcccgccagcgcgccgcacacgcctacccagcgcccgtggcgcgcggcgccctcggtggtggcggcgatcatgcgcagcaccgcgggatgcaggccatccatgcgtgccgccagctccggctggcagcggtcaatggccagggtgtactgggtcaggtcgttggtgccgatcgagaagaaatcggcgtgctcggccagctggtcggccagcagcgcggcggaagggacttcgatcatcacgccgacctcgatctcgggatcggtaccggcttcggccgccagcgcacggatgcgttcgcgccaggccagcagttcgccgacctcgctgaccatcggcagcaggatgcgcagcggcccgctcgcgcgcactgcaagcaggccgcgcagctggtcgtccagcagttgcgggcgcacctgcgccaggcgcacgccgcgcaggcccagggcggggttgtcttcggcaggcaggtgcagccaggcggcgtccttgtcggcgccgatatcaagcgtgcgcacgatcgcgctgcggccctgcagggcatcggcaatggcctggcagctggcggtgtggtccgccgccgcgggggctgcgtcgccgtgcaggaacagcagttcggtgcgcagcaagccgaccgcgtcggcaccatgcgccacggcattgcgggcgtcgtcgaggctgccgatattcgcggccacctcaataggcacgccgtcgcgggtgctggccgcggcgtgcgcggcgcgcaggtcggcctcgcgctgctgcgcgcgcagcctgacggcgctggcggcggcggccagcaaatgcgcatcggggcaggcgtgcaggcgggcgctgtcgccgtcggcgatgaccggcgtgccgtcctgcaggcgctccagcgcgctgcccagagccaccaggcaagggatgccgagctgacgcgcgatgatggccgcgtgcgaggtcgggccgccgcgcgccatcaccagtgcggcaacccgggtgcggtccagtccggtcaggtcggacggcgtgaattccccggcggccagcacgatgacatcgccgtcggcggccggtgcgggcagctggaccggggcactgcccgccggggccagcgcacgcagcacgcgcttgcccaggtccagcaggtcggcagcgcgttcggccatgcggcggtcggccatcgcggacagcatggcggcttcggcccgggtggcctcgcgccaggcaaagcccgcgctcttgccggcggcgatcatggtctcggccgcggcctgcagggccgggtcttccagcagcgcgcgatgcatggcgaagatgccggcctcggcgccggcgcggcgtgcggtggcggcttcgctctcatgcgccagctgggcgtcgatggccgccagcgcggcgcgcagggcctcgcgctcggcagcaatcccctggccggcctcggccggctccggcgtggtctcgcgccaccagtgcagcgtgccgatcgcgatgccgggggcggcagccacgccggggatgccatccgccggcaggccggcgcccggcccaggctgcgcaatcggtgcggccaccgtgggcacgggttcttcttcgcccacgccggcgcgctgcagttcgtatgcgaccgcatcgagcgcggcaccggcatcgcggccggtcgccaccagctcgaccgcggcgccctcgtcggcggccaggcccagcagcgacaccaggctggccaggctcgcctgccggccgccgtagtgcaatgcgacggcggcgtccaggccgcgcgcggcttcgcgcgcccgtgccgcgggccgcgcgtgcaagccgccggggcaggccagcgtgaccgtgcgccgctgttcggctgcgctcgcgtggtcttcctgcgcgggcgccgcggcacccgcggcacgcacctgcagcagcaccgtgcggcccgcgtcggcctgcgccgcgccggtcctgccggcgaccgtgaaggcatcgccattggcgattgccatcaccgtcaccaggctcgacgcctgctgcgcgacacggtcgacatcgaaacggatcagcgcatccccctggcgcacggcagcgccctgcgccacgcaaggcgcaaagccttcgccgcgcagcgacaccgtatcgatgccgacatggagcagcacctgcgccccgcacggagcctgcagcgtcagggcgtggccggtggcggccaggtggacgatggtgccgtcgcaaggcgccaccagcgtgtcgctcagggggtcgatggccaggccgtcgccgaacatgccgtcggcaaagaccgggtccggcacggccgcgaggggaagcagcactccgctcaccggagcccgcagcaacagggtttcgctcgtctcagccattttgcttccagaagtcgcggcggccggtgcagaaatgcgacggcgccagggtcaggcgaaagatagacggcaaccgacaataaaaataccagtgaaaaccactacaacaatattgtatctaagtggcatctttattgaggcaaggcaaaacagtccttggatggtcctcacattcgccttaatcaccataacccacggagataggtaagatttttccaaatcacagcagcattttccgacgccataatcagcagaaccatttcaataccaattgacgtaaagcgaagcgatggcgatgttatcgcccagatgacgcaatgccgcaccatcgacgtcaaatgtcctaaagtggtatcatcacctccacactctggtacctacgaggattcgcaatggatcaacggctgcaggctctcaagccggacgaagcggaggcgacgccgatctacctgcaagtggcgcgcaggctggccgcggccatccaggccggccaatggcgggttggcgacgcgctgccgtccgagcgcacgctggtggattcactggagatttcacgcgtcacggcgcggcgcgcgctgcaggtgctggcagaggaaggcgcgatcacgcgcagccgcggcgcgggcacctttgtcgcgccgcgccctgagcagaaggcggcgcggctggacaacttcagcgagctggcgcgccggcgcggcatgacgccggccagcgaactggtggcgttcgaacgccgccgcgccacgccccaggaggctgcggcgctggcgctgcaggaaggggaagagattgtcagcctgacccgcctgcgcaaggccgacgggcaggtcttctggatggatgtcaccacgctggcactggccgtgctgcccgacgccagcgccatcggcgaatcgctgtacgcctacctggagcggatcggcaagccggtgctgcgcgtcaccgaaaggctgcgcgcgatcgtcgccggcgaagcactggccgcgcgcctgcagatcgcgcccggcgagccgctgctgcatatcctgcgcaccggctacacccatggcgaccagccggtcgaactgaccgacggctactgcctgaacgatttctacgagctgaagcagtagtgcccggcacgcccggcaaccggcggctcgaccgggggcggggtcggatcttcctctggcggcaacggcaagtccggggggatgcccggcggcccgggctcttcgaccgggggcacggtatggcgcggctgcaggcgcgcaccggcgtgggggttcggcaaggcgggcatgcggggtctccgtggccgggtttcctcctcattgaagcaaacccggccggtgcgcgccagtattgatgcagacgccgctcaggcgtgttgccggcgcacgaagaacagcgccgcgcccaccgccatcagcacgctgccaaagaagcggttctgccagcgcaccgcgcgcgcattacggaacagcccctgcatgcgcgacgccagcagcgcatagccatgcatcaccaccaggtccacgcagcacatggtggccgccaggatcgccagctgcagcgcaagcggccggttgggatcgatgaactgcggcagcaccgcgaccatgaagatgatgcccttggggttggtcacattggtcagcaggccggtggcaaagcgccggcgccggctcatcaccgctacgcgcacgggggcggtgctgccaccctggtccgccccgctctccacctgcgcgcgccattgctgcacgccgaggtagatcaggtacagcgcgcctatcgtcttgaccaccatgaaggcctgctccgaggccagcagcagcgcgcccaggccgccgcccgccaccagcagcacgatcaccagcccggcctgcaggccaaagatggtggtggtggtcctgcgcagcccgtacgagagcccatggctcatcgacagcaccgcgcccgaccccggcgacacggcgatcacccagcacgcggcgaaaaaagccaaccatacttcccaacgcatcccactctcctttgacgacaaccatgccggggccacgctcccgcagccacggcaccaacaatctttcctgcgacgcggcgcgtcagaacgggtggaagccgcccaggaactgctccacctgctcggcctggcgcgcgtcgcgcgcggcatcgcccgattccagcaccaccgcctggtacgcgcgcgtacccaccgccaccaggcgcgccgtcagccggcgcggcgactggtcctgcggcgacaccccgctggcctgcacttccacgccggcaagcgggcggcccggacggtcggcgctcatcacggtgacgggccgcgcgcgcggctcgcccgacggcgtgccgaggttggccagcaggccggcctgcatcgccgccagcgcctcgcgccgcagcgcttcgtcatcggcgggcagcgtcaccacgcccacggcgaacagcgtgtcgtcgacgcgcgcagcttccatcgtcatcggcagcttgcgcccggcaatggtcacgtcgcgcgcggcgctggtgggcttgcccggatagagcgcggcgtaggcgccctcgccggactggatggtgcgccagtcatagcgcggtgaacaggcgcacagggcgaatgccagcacggcggcacagcacagcagcgggcggcggacagcggcaggaaagctcggcgggggcggcacaagacgcatcgggaatccatgggggacggcgcgcgcaggctgcgggcggcgctggcggacgccatcgcctgcgggcggaaaccggtattatcccgaaagcggcgcttcagtgcttgctgcgccgctcccgctaccgccctgcccccacgttccagccatgcctgccgccctcattgcccgccacgccttcgccatagccagcctgcgctgggtggccgcgggtgcgttgctggcagccgcggccggcatgcccgcagccgcggccggcatgcccgcagccgcggccagccccgcccacctgccgccggccaccgacctggccgcccacggcaccgaggccgcgcgccgcggcgagccgctggtggtgctggtgtcgatgccgggctgcagctattgcgacgcggtgcgccgcaactacctgggcccgcaggccgccgccggcgagattgccgtgcgcgagctcgacatgaccgccgacaccccgctgcgcgatgccgacggcagcctgaccaccgcgcgcgcgtgggcccgggcgcaccaggtgcgggtggcgcccacggtgctgttcctggaccgccagggccgcgccgccgccggcccgctgcgcggcatgcagccggatttctacggcgcctacctggaacaggcgctggaccaggcacgcgccgccgtccggcgctgaatcgatcgggacgcttgcggcggattgccgcagcccggccccgcgcagcgcgcgaacgcctgcggcattagaatgtcccattgctgaccgaacctgcctgacccggattccatgaccactgctgcccctgccaccaaatcctcccgcaagccctggcccatcgtcgcggccgtggtcgtgctcgcgctgctgggctggttcggctaccgcgcgctggcgccggccaatacggccccggcggccaccttcacgctgctgtcgggcgagaaggtcagcaccgccgacctcaagggcaaggtctacatgatcaacttctgggccaccagctgcgccacctgcgtcaaggaaatgcctgacatggtccgcacctatgagcagttcaagggcaaggggctggaattcgtcgccgtggcgatgaactacgacccgcccatgtatgtaatgaactacgccaggacgcgcggcctgccgttcaaggtggcgatggattccgacggcaccgcggccagggccttcggcaatgtgcagctgacgccgaccaccttcgtggtcgacaaggacggccgcatcctgaagcgctatgtgggcgagcccgagtgggatgcgctgcacaagctgctggatggcgcgctggcaaagtccgcgtaacgctcccgcggcaaccgcagcgaaaaggtgctcatcgagcacctttttctgtttttgcgcacgatcgctagggcagcaggttgcgcgacatccctgtatggatatacagttggcgccagcctttttctgagttttccgagccttccccgagccccgcctgtgactttggacctagcccccgccgccgacctcgctgcccctggagccgatgatgtccccgcctacctgtcccggctcaacccggagcagcgcgccgcggtggaacacggcagcgacgcgccgctgctgatcatcgccggcgccggctcgggcaagaccaatacgctggcgcaccgggtcgcgcacctggtgctggccggcgccgatccgcgacgcatcctgctgctgacgttctcgcgccgcgccgcggcggagatgggacggcgcgtcgagcgcatcgtcgaccaggcgctcggcacccagaccggcgcggggcgcgcggcgctgcagtggtccggcaccttccacgccatcggcgcgcgcctgctgcgcgaatacgccgagaccctgggcctgtcgcccgccttcaccatcagcgaccgcggcgatgccgccgacctgatgcacgtggtgcgccacgacctgggcctgtcggagaccgccagccgcttcccgaagaaggaaacctgcctggcgatctactcgcgcgtggtcaacacccaggcgccgctggaagacgtgctcaagcagcagttcccgcgctacgcgatgtgggcggatgcgctgcgcaccctgttcgccggctatgtcgaggccaagcagaagcagcatgtgctggactatgacgacctgctgctgtactgggcgcaggccatggccgagcccaccatcgcgcaggacatgggcgcgcgcttcgaccacgtgctggtcgacgaataccaggacaccaatgcgctgcaggcgtcgatcctgctggccatgcggccggacggccgcggcctgaccgtggtgggagacgacgcgcagtcgatctacgccttccgcggcgccaccgtgcgcaatatcctggacttcccggcgcagttcacgccggccgcgcagcaggtcacgctgtcgcagaactaccgctcgacgcagccgatcctgcaggccgccaacgccgtgatcgggctggcggccgagcgctataccaaggacctgtggtccgagcgcgcctcggccgaaaagcccggcgtgatcgtggtcaacgatgaggccgaccaggcccgctacgtggtcgagcaggtgctggcgcggcgcgaggccggcctgacgctgatggcacaggcggtgctgttccgcgccgccgaccacagcgcgcaggtagagatcgagctggcccggcgcaatatcccgttcgtgaagttcggcgggctgaaattcctggaatcgacccacgtcaaggacgcgctggcggtggtgcgctggctggagaacccgcgcgaccgcatggcgggcttccgcacgctgcagctgctgcccggcatcggccccaagaccgcggcgcgcgtgctcgatgcgctggcgctggccaccgagcccttgttctcgctggagcaattcgagccgccgccggccgcagcgcccgcctgggccgacctgctggcgctggcgcgcgcgctgatggcgcccacctcgccgtggccgtcggagttcgagcaagtgctggcctggtacgcgccgcacctggagcgcctgcacgacgatgccgccgcgcgccaggccgacctgcagcagctggagcgcatcgccgccacctacggcgcgcgcgagcgcttcctgaccgaactgacgctggacccgcccagcgcctccagcgacgaatccggcgtgccctcgcgcgacgaggactacctgatcctgtcgaccatccactcggccaagggccaggaatggaaggcggtgtacgtgctcaatgcggttgacggctgcatgccgagcgacctggcgaccggcaccaccgaagagatcgaggaagaacggcggctgctctatgtggcaatgacgcgggccagggaccacctggacatcgtggtgccgcagcgcttctacgtgcaccagcaggtgggcttcggcgaccggcatgtgtatgcgtcgcgcacgcgcttcctgcccaaccgcgtgatgcccaacttctacagccgctcgtggccacccccgccgatgccgggcgaagggccggccagacccgcgctggcgccggtggacctggccagccggatgcggaatatgtggcgctgaccagcgccacacatccgtcttacgctaccttctccagcagcaaacccttgaggtactcgccttccgggaatgccgccagcatcgggtgatccgtgccggccgacagccgccgcaggatgcgtgcatcggcgcgcgcatcggtcaccgcgcccgccacgatcttctggaacagctccatgctgatcgcgcccgagcacgagtaggtaaacagcagcccgcccgggcgcagcagctgcatgccgaccaggttgatttccttgtaggcgcgcgcggcgcggtcgatatgctgcgccgacggggcgaacttgggcgggtccagcacgatcaggtcgaactggcggccctcggcgcggaattcacgcagggtcttgaacacgtcggcatcgagccaggtggcacgctcgggttcgaagccgttgagcgtgacattgccagcggcgatcttcagcgcctcgcccgacgaatcgatcgaggtcaccgaggtggcgccgccgcgcagcgccgccagcgagaagccgccggtatagcagaagcagttcagcacctcgcgcccggcggccaggtcgcccaccagcttgcggttgtcgcgctggtcgacatagaagccggtcttgtggccgttgcgcacgtcgacgtagtagcgcacgccgtgctcggtgaccgacagcgccggatccggctcggcgccggccagcaccccggtcaccagctccaggccttcgcgctggcgcacggcggcgtcggaacgctcatagacgttggggcagccggtttccttgaccagtgcctgcacgatcgcggtcttccagtgttccacgccggccgaattgaactggcacaccagctggcccttatcaccgttgccgtagtagtcgacgatcaggccgggcagccggtcggattcgccgaagatcagccgcactgcgtcgctgtccttcacccattggcgccggtaggcaacggccgcggccacgcggcgcttgaacagggcgtggtcgaccggctcgttttcatcgaaggtccacgcgcgcgcgcggatctgcgactcggggctgtaggcggccttggccaggaagcggccgtcggcggcgcgcacgatcacggtcgcgcccggctcgcagcgcccttcggtcgtggcaatgccggtggcgtagatccacgggtggcggcgcagcagggatttttccttgccgggtttcagggtgatggtgttcatgttggtatggggaaactgcagaccaccagcaattgaaactggcgcgaacgcatcaaggcgactcccctctcccgcgcgcgggagaggggagaaaacaatgcgggaaggacaggttagaggacgaccttcaccatcggatgcgaagtcagcgcccgatacaagtcgtcgagctgctcgcggctggtgacccacaccgtcacggtcaggcccaggtagttgccgccgctggaggggcgcatttccatcttgccggcgtggaagtcgggatcgaactcctgcaccagcgtgacgatggcctcggcaaagccgtcctgcatcgcgcccatcaccttgatgggaaagtggctggggtattcgatcagcgactgctccggcgggatgtcgcccggcttgttgctgccttgcttgtcggttgtcatgtcggattctccggcacgaaaccggcgcgccgcatggcgcgccggcttacgcgcattcaggtcacttgcgcttgaaccacaggcggatggtgtcccacaggcggccgaagaagccggcctcgggcacttcttccagcgccaccaccgggaactccgccaccttgttggtgccgtccatcagcttgaccatgcccacctgctggcctgccgagatcggcgcgatcagcagttcctggcgctccagcaccggcttgaggcgtccgccggtgcccttgggcacggtgacgaaggtctcgttctgcacgccgatcttgaccgtgccgctcttgcccttgtagatgtccggcgtggccagcacctggcccttgtcgtacaggcgcagcgtgtcgaagaactggaagccgtagttgaggatcttcaggctttcctgggtgcgcacctgttcggtggtggtgccgatcacgatcgagatcaggcggcgcgagccgtccggcacgttggccagcggccgcttggccgacgagatcaggcagtagccggcggacttggtgtggccggtcttgacgccgtccacggtcgggtcgatgtacagcaggcggttgcggttgggctgcctgatcttgttataggtgaactccttctgcgagtacatggcgtagtactcgggaaagtccttgatcaggcgcgtggtcagcgtggccaggtcgaccgcggtggtgtagtggttcgggtcgggaatgccgtcggtgttggtgaagtgggtgttcttcatgcccatgcgctgggcctcgcggttcatcatcgcgacgaagccctcttccgagccgcccacggcttcggccagcgccagcgcggcgtcgttgcccgactgcacgatcaggcccagcagcaggtcctgcacggtgaccggcttgttgggctcgatgaacatgcgcgactcgtcgcttttgaccttgagcaccacgctggtcggcaccaccgcctggtccagcgtcaggcgcttttccttgagtgcctcgaacgccaggtaggcggtcatcagcttggtcagcgaggccggctcgatgcgcgcatcggcattctgcgacgccagggcctggccgctggtcacgtcatacagcatccacgacttggctgcgacttgcggcatcggcacgccctgcgccaggacggcggcaggcgcggcggccagcacgatggcggcggcgatggcggcgggagcaaaagcggacgaaaggcgtgtcgtggctcgattcagcatgtttctgttttccgacagtaagaaggtggcgcggggatggtccgggtggcggcgtgccggcctcaccggtcccacgcattgacgacgagctgcttgatcaggtgcagcttgcggtgaaagaaatggtcggcgccggggatcacgatcaccggcagctcctgcgggcgggcccagtcgaacacgctggccagcggcacggtgtcgtcctgttcgccatggatcacgatggtgtcggccggcacctcggctacctgccagcggctggcggcggtgcccaccagcaccaggcgctgcgcgggcgtgccggcctcggccaggcggcgcgccacgtgggtggtgacgaagctgccgaacgagaacccgcccatggccagcggcagcgttgcggcctgtgccgaccacgcggtctgctggcgcatccaggccaccacggccagcaggtcgtcctgctcggcgatgccgttgtcatgctcgccggcgctgccgccgacgccgcggaagttggggcgcaccgtggcatagcccagttgcacgaagctgcgcgccagcgtctgcgcgaccttgttgtccttggtgccgccgaacagcggatgcggatgcgctaccagcgccaggccgcgcggctcaccttgcggcaggtctaccgagagatcgatcgcaccggcgggaccggcgatggaaagtacctgggtatgcgcgttcatgatggcggtcaggatggcggtgaagccagcgcccggcgggaagcccgggcaaaaatgaaaaaaccgtccggctggcgggcggcggagcaatacggcaaagcggcaaaacagggaagcaacaagccggcatgcgccggcttcggttggttcagcggtccaccatcagccgttcgacaggcttgcccttcatcaggtggctgtcgatgatttcatcgatgtcgtgctcgtcgacaaaggtgtaccagatggcctcggggtagaccaccagcaccgggccgagttcacaacggttcaggcagcctgccttgttgatgcgcacgcggccttcgccgccggcgatgcccagttccttgcaacgcttcttggcgtattcctgcatcgcctgggcgttgtggttggcgcagcagttctcgccggcctcgcgctggttcaggcagaagaagacgtggtgctggtagtagctgctcatgcgtacggtgtgagaaggcggccccggacggcggcacggcccggacggcattgaacggaagctcggaattatacggtgtcgcggcggcatggccgcgatggcggcgccctggcacggcggtctaagttgccgccggcccccatcgggtggcgcttcgcgcacctgcgatgcatccggcattccgaaaccccggagtcgcgccgtccggatttccggaatcccggaggccgcgcgcccgtgccgggccggtgtttccttgtgaatcaaccagttagcaatgccggtttgactggcacggcggttgcgaattcccgtccctgaacgcgccgcaaccgtgacggcgcgcggcccgagcgatagcgcccgggtacggtcaacaccgaggacgacatcatgagaaaacccttctacaagatcctgtacgtgcaggtcctgttcgccatctgcgtcggcatcctgctcggccactactggcccgacaccggcgtggccatgaagccgctcggcgatggctttatcaagctgatcaagatgatcatcggcccgatcatcttctgcaccgtggtgaccggcatcgccggcatgagcgacatgaagaaggtcggccgcgtcggcggcaaggcgctgctgtacttcgaggtggtgtcgaccttcgcattgctgatcgggctgggcgccgcgcacctgctcaagccgggcgtgggcttcaacatcgacccggccacgctggacaccaaggcgattgcccagtacgtgtccaaggcgcacggccagagcacggtcgagttcctgatgcacatcatcccggacacggtcttcagcgccttcgccaacggcgacatcctgcagatcctgctggtgtcgctgttcttcggcgccgcgctggccgtgctcggcgaacgcgcgcgcatcgtggtgcagctgatcgagcaggtctccaaggtgttcttccatatcgtccacgtgatcaccaaggtggccccgatcggcgccttcggcgcgatggctttcaccatcggcaagtacggcctgggctcgctggtgccgctgctcaagctgatcggcaccttctacttcacggccatcatcttcgtgctggtggtgctgggcacgatcgcacgcatgaccggcttcagcatcgtgcgcttcatctcgtacatcaaggaagagctgctgatcgtgctgggcaccagctcgtcggaagcggcgctgccgcacatgatggagaagctggaaaagctcggctgctcgcgctcggtggtgggcctggtggtgcccaccggctattcgttcaacctggacggcaccaacatctacatgacgatggcggtgatcttcatcgcgcaggccaccggcatcgagctgacgctgatgcagcagctgaccatcctggcggtggcgatgatcacctccaagggcgccagcggcgtgaccggctcgggcttcatcacgctggccgcgacgctggcggtggtgccgaccatccccgtggcgggcatggtgctgatcctcggcatcgaccgcttcatgagcgagtgccgcgcgctgaccaacatcatcggcaacggcgtggccacggtggtggtctcggcatgggagcgcgagcttgaccgcaagcgcctggccagcgtgctgaacggcggcagcggcgatgtggcggatcttgccgacgtgggccagggcgtccgctgagggcgccaccaccgctgcgcggacggctgccccggccgcccgccagcaggtatcatcggcgcgacagcccccgcgcgcgccgatgacccactcagacgattttctcgccgtgcatgaccccgccgccacccgtccggcccacgcgccggacgtcggcagcgggcggtggtggggctttgccgtggcgctggccgcgggtctcctgctgctgtgcgcgctgacctggctggtctcggtccagcgcggcctggccagcctccagcaaagcacggccacgcgcgccgaccgctacgccgccacgctggaaagcaccctcgaccgctacgaattcctgcccgcgctggtctcgctgcaccccttcgtgcgcgggctgctggactcccccgacgacccgcaacgcgtggccgccgccaaccagtacctggcggaggtcaaccgccgcgcgcatgcctcggccacttatgtgatcgccgccaacggcattgcgctggcggccagcaaccacggccagcccggcagctttgtcggcacagactaccgcttccgcccctacttccagaccgccgcgggcggcaagatggggcgcttctatgccatcggcatcaccagcgacgagcccggctactacctcgcgcagccggtcgagtccggcggcaaggtcatcggcgtgaccgtggtcaagctcaacctggagtggttccagcgcgccggcagcggcgccgagccgctgatggtcagtgacgaccatggcgtgatcttcctgtcgtcagtatcggcctggcagtaccgcaccctgcgcccgctgccgccgccgctgcaggccgagatggaaaagacacgccagtaccacggccgcgcggtgacgccgctgccgctggagccgctgacctcgccggtcacgcgctggctggcggacaccacgctggccgacggcgcgcggctggtgcgcgtgcgcgacgaatcgcccgccagcaagaccacctctgccccggacggcgccgaacgcgccgtccgctacctggaactggaccgcacggtcggcgcggctggctggaccatgcaggtgatggcgccgctggagccggtgctggccaatgcgcgcaacgccaccgtggcggcggcgctggcctatgcctgcatctgcctgctgctggtcaactggcgccagcgccgccagcgcgcgcgcgacatgcagtacagccgccgcctgcttgaggccgcctacgaccagctggagcgccgcgtcgaggcccgcaccgccgacctgatggcgatcaatgaaaagctggaagatgaagtggccgagcgtacccgtgctgaaagcgagctgcgcgcggcccaggacgaactggtgcaggccagcaagctggccgcgctggggcagatggcggccggcatcacgcatgagctgaaccagccgctggcggcgctgcgcacgttctcggacaacacccgcgtgctgctggagcgcggccagctggccgcggccgaaggcaacctgaccgccattgccgacctgaccgagcgcatgggcaagatcaccgggcagctcaagctgttcgccggcaaggcgcgcccggtgcaccggccggtcgcgctgcgcgccgcggtcgatcatgtgctggcgctgctggcaccgcgccttggcgcggtcaccgtcaacgtcaccggcctggacgccctgcccgggctggccgtgcgcgccgatgagctgaagctggagcaagtgctgctgaacctgctcggcaacgcgctggatgcgattgcggcggccgcaccggcgcagggacagatcgatctcgaggtgcaggcagaagaccacgccgtcaccatcgtcgtgcgcgacaacggcaccggcatcgcgccgcaagcgctgccgcgcctgttcgaacccttcttcaccaccaaggaaaccgggcagggtctggggctggggctggcgatctcgtcgtcgatcgtgcgcgagttcggcggccagctgagcgtggccaacgtgcccggcggcggcgcgcagttcacgctggtgctggcgcgcgcccccgccatcgatccggcgccatcggtttccgcctctcaatgagtattgccatgcaagacggtctgcgtgtcctgtttgtcgaagacgagccgctggtgcgccaggccaccgcgcagagcctggagctggccggcttcgcggtgctggcgctgccctccgccgaggccgcgatcccgcacctgcacggcgcctttgccggcgtggtggtgaccgacgtgcgcctgcccggcgccagcgggctggacctgctgcagcactgccgcaacgccgcgccgggcgtgccggtgatcctggtgaccggccacggcgacatcaccatggccgtgcaagccatgcgcgaaggcgcctacgactttatcgaaaagcccttcggcgccgaccgcctcaccgacactgtgcgccgcgcgctggaacgccgcgcgctggaactggaaaaccaggcgctgcgccgcgaactggccggccccgcggcgggcacgcgcatcatcggccgctcgcccgcgatcgggcaggtgcgcgcgctggtggccaatgtcgcgcccaccgacgtgccggtgatgatcaacggcgagaccggcaccggcaaggaactggtggcgcgcagcctgcacgcgctgtccggccgcgccgaaggcccgtttatcgcgctgaactgcggcgcggtgcccgaggccatcttcgagagcgagatgttcggccacgaggccggcgccttcaccggggccggcaagcgccgcatcggcaagctcgagcatgcctcgggcggcacgctcttcctcgacgagattgagagcatgccgctggcgctgcaggtcaagctgctgcgggtactgcaggaaggctcgctggagcggctggggtcgaatgcctcggtgaagatcgatgtgcgcatcgtcgccgcggccaagggcgacatggatgcgctggtggtacagggcagcttccgcgaggacctgtattaccggctgaacgtggtcaccatcgcgctgccgccgctgcgcgagcggcgcgaggacatcgtgccgctgttcgagcatttctcgctggtgtccgcggtgcgctaccagcggccggcgccgatcctgtccgaggcgcaacgccaggcactggcccagcgtccctggccgggcaatgtgcgcgagctgcgcaatgcggcggatcggatggtgctgggcgtgccggagggcgggcaggcaggtgcgcaggccgcgggccccgatgaaaccgcgccgctgcgagagcggatggagcacttcgagcgcgcggtgattgcggatgcactggcacgcaccggcggcgctgtcagccaggcggcggacttgctgcaagtcggcaaggccacgctctatgacaaaatcaagcgctacgggctgtgatgtcatgctgccttcattgcgctgccatgccgccgtcacattggcggcctattcttcgatggcggctgcggcattggcaggtgcccgccgtgtgtatcaatcttcgtggtaattgacggccccgcgtatgcggggcgtttttttgggttgtgcaccccgccccgccacttcacactcgccacacattcccctcacccccgctggccagactggagccctgccatctccgggacccgccatgccctccttcgactacgacatcgtcatcgccggcgccagctttgccggcgccgcctgcgccctggccgcggcgcgcgccggcctgcgcgtgctggtgctggaacgcaagaccgatcccggcgacaagctccacaccaccggcatcctggtcaaggaagccatcgagcagacctggctgggccgcgcgccggccgattgcgtgcaccgcgtggagcaggtgcggctgtactcgcccaggctgcgcagcatcgacctgagtgcgcccggctattatttccacaccaccgatacgccgcgcctgatgcgctggctggccgccgagctggtgcgccaccgggtcgagctgcgcctgggccaggcgttcgtgggcgcggtgccgcgcaacggcggttggcatgtgaccggcgtgggcaatacgcgctatctggtcggcgcggatggcgcgaaatcgcgcgtggcccagtgtgccgggctggggcgcgtgcacagcttcctgtatggcgtggagtatgagttcccgggactggcgctgcccgagccgggcgcgctgcactgcttcatcacccggcgcttcgcacccggctatatcggctggatcgcgcagaaccccaccggcgtgcaggccggcctggcgctgcgctacctgcctcggcacggccgcgcgccagacctggacggtctgctggcgcatgtgcgcgagcgcgccggcctgccgcaactggcgcagcctgcggcgacgcgcgcggggctgatcccatgcggcggcccggccttcccgctggcgcgcgacggcgtgatcctgacgggagatgccgccggcatcgtgtcgccggtcaccgccgggggcatccactatgcctttgcccatggcgagtcggtcggccaggccgtggccgcgcacctgctgcgcggcggcccggccccggaagcggtcgccaccgccggcgcgccgcgctttcgcgccaaacgtgcgctgcgctggatgttcgaccgcttccagtgcgactggcccttcgacctgatgctgtactcgccgccgctgcgctgggcggcggagcagatctatttccacaagcgccgaggcgaggatcccgcgccgccgccgcgcgcagccaccagcgcctgaccggctggtccactgaatcactgaaatgggaggcgaaggacatgtcatgcgggatgcagcgctagggcgaagcaggggtttcggattgcatggcaatccgcctgcgtagcggcatgcgcttgcaagcgcatgtgcgccctgcaagggcagggcgcagcaatagcacggctattgcgagcatttgcaacgacgcgatgcgcccgcatgacatggcaggcgccgaccgatttcagtgattcagtggactaaaatgccgggcatggaacaaccgcggatcctggtggtggaagacgagcaggccatcgccgacaccatcctctatgccttgcgcaccgacggcatgctggccgagcactgcacgctcggcggcgccgcgctcgagcgcatgcgcgccggcgcggccgacctggtaatcctggacgtgggcctgccggatctgagcggtttcgaggtctgccgcacgctacgcacgttcagcaatgcgccggtggtcttcctgaccgcgcgccatgaagagatcgaccgcatcgtcgggctggaaatcggcgccgacgactacgtggtcaagcccttctcgccgcgcgagctggccgcgcgcgtgcgcgccatcctgcgccgggcgcgcggcggcggtgctaccgcggcgaagagcgacgaagttgccggcttcacgcacgacaaggacggcgcgcgcctggcctaccgcggccgctggctggagctgacccgctacgagtacctgctgctggcctggctggtgacacatccgggccgcatctactcgcgcgcgcagctgatggagtgcgtctgggaagatgcactcgacaccagcgaccgcaccgtcgacacccatatcaagaccctgcgcgccaagctgcgggaggcttccgccgacggcgccgagcgcatccgcacccatcgcggcatgggctattcgctggaaccctgagcgcacgccatgcatatcggcctgcgcatcttcttcggcttcttcctgatcgttggactggccacggtgctgacgctgcgcgtgtttgtgcaggaggtcaagcccggcgtgcgccaggccatggaagacacgctgatcgacaccgcgcacgtgctggcggcgcttgccgccgacgacatgaaggccggacgcattgccgacggcgatttcgcgcggcacatggcggcgctgcgcgatgtggcggtgaatgccgatgtgtcgggcctgcacaaggacagcatcggctaccgcgtctacgtgaccgatgccaacggcatcgtgcgctttgactccaccggtactgacgtgggccgcgactattcgcgctggaacgatgtttacctgacgctgcgcggcaagtacggcgcacgcagcacgcgcaccgaccccgacgacgaggccagcaccgtgatgcacgtggccgcgccaatacgcgacgcggacggcgagcgcatcatcggcgtgctgaccgtggccaagcccaatgcggcgatggcgcccttcatcgagcgcagccagcgcaagatcctgctctacggcggcctgctgatcggcgctgcctgcgtgatcgggctggcctgcacgctgtggctggcgcatggacttagccggctgcgcgggtatgcgcgcgcggtggcggccggcgagcgcgcggagatgccgctgcgcggcggcagcgagctggccgagctgggccgcgcggtgcagggcatgcgcgagcggctggaagacaagcagtatgtcgagcactacatccacacgctgacccatgagatgaagagcccgctggccgcgatcggcggcgccgccgagctgctgcaggaagagatgccggcggcggaccgccagcgcttcgtcgccaatatccgtgcacaatccgggcggcttgaaaccatgatccgcaagctgctggcactggccgatgtcgagcagcgccagcgcctggaagtgcgcgagccggtgcggctggcgccgctgctggcgcaactgggcagcgagctggaaccgcgcgcgcgccagcgcggcgtcacgctgcggctggccgccgacgccagcccggacctggtcgccggcgatccgttcctgctgcgccaggccatcgccaacctgctggagaatgccatcgatttcgccccgccggacagcaaagtcatggtgcggctggagcgccgcggcggcgcgctggccatcgccgtcgccgaccagggcccgggcatccccgactacgcgctgccgcgcgtgttcgagcgcttctactcgctgccacgcccgcacggtgcggacaagagcaccggcctgggcctgtgctttgcacgcgaggtggcaacgttgcatgatggcgatgtaacgctggccaaccgccccggcggcggcgcgctggcggaactgacccttccggccgggtagttcgacgaggtgaccggaccggcatagactggggcttctaacgtgaccgcgctgaaactccctataatcgaacgaccgttcatttagggcacctgcactgtgcccgtcagtagttcaggagacaccatgcccgccgccaagcaactgccccaggccctgcagaacctggccctgcccgtcatcgcctcgcccatgttcatcgtcagctacccggagctggtgctggcgcagtgcaaggccggcatcgtcggctcattcccggcgctcaatgcgcgcccggcggagctgctcgacgagtggctcacccagatcgaaggcgagctggccaccttcaaggccgccaacccgggcgcgcaggtgggcccggtcgcggtcaaccagatcgtgcatacctcgaacgcgcggctcgaacacgacgtaaaggtgtgcgtggaccacaaggtgccgatcttcatcacctcgctgcgcgcaccggtcaaggaaatgatcgacgcggtgcacagctatggcggcatcgtgctgcacgacgtgatcagcatgcgccatgccgagaaggcgatcgaggccggcgtcgacggcctgatcctggtggccgccggcgccggcggccatgccggcatgctgtcgccgttcgcgctggtgggcgaggtgcgcaagatcttcgacggcccgatcgcgctgtcgggctcgatcgccaccggcgaggcggtgctggccgcgcaggccatgggcgcggactttgcctacgtcggcacgcgctttatcgcctcgcaggaggcccacgcggcggaatcgtacaagcagtcgatcaccagctcggccgccgccgatatcatctacaccaacctgttcaccggcgtgcacggcaactacatccgcgaaagcatcagcaacgtggggctggatccggacaacctgccggtggccgacaagagcaagatggacttctccagcggcgcctccaaggccaaggcatggaaggacgtctggggcgccggccagggcgtgggccagatccacgacatccccaccgccggcgaaatcgtcgcgcgcatgaaagcggagtacgatgccgccaaggcgcgcctgggtatcgcgcgctaaccgaggtttttaccgggccgctattgcggcccttcattcaaccattgcctggtccaagctccaccaccccgcccgattccgacgccacgttgagccgccggcagcaggcgctgcgcgccatgtgggtggtgctgggcgcggtcttcctgctgctgggggtgatcggcatcttcctgccggtgctgccgaccacgccattcgtgctgctggccgcggcatgcttcgcgcggggatcccggcgcttccatgaatggctgctgggacatccgcgcttcgggccgctggtcagcgactggcagcgcaatcgcagcattcccttccgggccaagtgcctggcgttgtcgatgatgtgggcgtcgatggggacgaccgcgtggatgctgcgggcgcggccgcttgcttcggcggcgctgctggcttgtgcggtgggggtgagcgtgtggatggtcaggctgccgacgcggccggtggagggggggaagtcctgacctgccctgcatcaaaggccccgcccatgcggggcctttgacttgtcttcagtcgtatcgccgcgcatcctcgatcagcttcccatcctgcggcaacgaccccgccgcaacgaaagctacttcaccgcgcagccgcatcacttcgcgcagcgattccgccaccgcacgctgcaagtcaccatcctcgcgcgtagcctcgcagcgcagcgtcatcacgtccgcgcctgggtcgccagtcaccaccagccgcgccgcgcggatctccggatgccgccgcagcacgtctgccacctgcccgggatgcacgaacatgcccttgaccttggtggcctggtcggcacggcccagccagcccttgagtcggatattggtgcgcccgcacgggctgggccgctgcgacgactccgccacgatggccgagaggtcgccggtgccgaagcggatcagcgggtagtcgccgttgcccagcaccgtcaccaccacctcgccggtctcgccctcgggcatcggccgggaaccgccgggctcgacgatctctaccagcacgccctcgtccaccacccagccatcgccgccctcggtctcataggcaatcaggccgacatccgcggtgccatacatctgctgcacgcgcacgccgcgcgcctggaaccaggcacgcagcgacggcggcagcgcctcgcccgagaccagcgccttggccaggctggtgcagggcgtgcccagctcgtcgccgcgctccagcagcagcttcaggaacgacggcgtgccggcgtaggccgtgggctgcaggctggccagcgcctgcacctgcgaatcggtctggccgacgccggccgggaacacgcagcagcccagccggtgcgcgccggtctccatcatcatgccggccggggtgaagtggtaggagaaggtgttgtagaccagctcgccggcgcggaagcccgccgcatgcatggcgcgggccacgcgccaccagtcggcgtcatggccgtcgggttcatggatcgggccgggcgactggaacacatggcgcagcttgcccagcggcgtggcgttgagcccgcccagcggcggcagtgcgcgctggcgcgcggtcaggtccgacttgcgcgtgaccggcagcgccgccagcgccgcgcgcgagctcagcagccgcgggtcgacgccgcccagcatctcggcaaagtaaggcgcgttgtcgcgcgcatgggccacctggcgtgccagggcggcaaggagcgcctgctcgcggacttccggcgcgcgggtttcgagcgaatcgaagtgttctggcatggtgctatgcgtcagggaatgggatgcggcatgccgccgcgccgctgggcgcgtggtggcaatgccggatgaaatcggtcgggtgcctacgccagccagcgcttgcggcgccggtagctcttcacatcgcggaacgacttgcgcccggcaccgtcgtccgcatcgttggcggccacgcccaggtagaactccttgacgtcctcgttggtgcgcagcgactcggcgtcgccgtccatcaccacgcggccgttttccaggatgtagccgtagtcggcatagcgcagcgccaccatggtgttctgctcggccagcaggaagctgacgttctcgcgcgaattcaggccgcgcacgatctcgaagatctcctcgacgatctgcggcgccagccccatcgaaggctcgtccagcaggatcatcgcgggcttggccatcatggcccggccgatcgcgcacatctgctgctcgccgccggaggtgtagccggcctgcgacttgcggcgcgtcttcagccgcgggaagtattcgtagatcttttccagctcgtcgcgcgtctggccgcgcgacaggccgcgcgtgtaggcaccggtgagcaggttctcttcgatggtcaggtgcgcgaagcagtggcgcccttccatcacctggatcacgccgcggcgcaccaggtcgttgggcgtgagctggtcgacgcggtcgccgcgatattcgatcgagcccttggtgacatcgccgcgctcggcctgcagcaggttggagatggccttgagcgtggtggtcttgcccgcgccgttggcgccgagcagcgccacgatcttgccttccggtacttcgagcgagacgcccttgagcaccaggatcacgtgatcgtagatgacttcgatattgttgacggacagaaggctcatggtgcggctcgtgttggtaagacggttcggctcaggcgagcacgcggcgccaggcaccgcatgcccgccaggttgctatcaggacttcgaacaagccggcgtaatccccttctccttcgcgtactgcgccgccgtggccttgaacagcgggtggatcaggcccttgttgccctcgatccagtccgacaccaccacccacttggtgccgtcccactgctggatcttcaccttgcccgagccctcgtggttgtcgcagctggtcttgatctcgggcagcaggccggtcgcgcccagttgctgcaggcgcgcgttggtcaggttcaggttctcgaaggcccagcgcatctgctcgccggtcatgggcttgcccttgccgaacttggcctgcgccacgcgcaccgcttccaccgtcaccaccgccgccgacacgccgcggttgtacagcaccgaacccaccttgttcttgtcctgcatattgcccttgccggcaccgtagaccaccttctcgatatcggcgatcagcggcacgttgcggcccgccacgttccaggtggcgctcatgtagcccttggaggcatcacccgccggcaccgtgtcttcctccgagccggcccaccacgagccgattatcttgtcgcgcgcaaaacccaccttctgcgcggccttcagcgcggtctggttcatcacgccccagccccagaagatcacgtagtcggggttctcctggcgaatcttcagccactgcgcgccctgctcgttgccggggtgcgccaccgggatctccaccaggttgaacttgcccagcttggcctcggcctgcagcgccacgatcggctccttgccataggccgagtcgtgatacaggtagacgatcttcttgccggccagcgagccgccgttcttcgaggccaggtacttgacgatggccgagacctgcatctggtacgtagtcaccagcgggaacgcatacgggaacaccgagccatccaccgcgtcggtgcggccgtagcccatcatcaccagcggcaccttgtcggcagcggtcttgtcgaccagcgcgtacgagatgccggtggacatggcgtggtaggccgtgcccttggtggtggcgttcttggacttcaggcgttcatagcactccacgcccttggcgttgttgtactcggtctcgcactcttcccacgacagcttgacgccgttgaccccgccttccttcaggttgacgtagttgaggtagtcgatgaagccgccataccaggactggccgttggcgccatacggccccacgcggtagcttggcagcgccacgaactgctcgttgctctgcgccatggccggcgccgccggcgccagcagtgccgccgcggcgctgaccaccagggcggcgcgttgcacattgcgaatcaggttggtcatgacagtctccatcgccctcaagggagcgtttcgttatgcgtaagcttcagaacttcacacaggaactgcggtaatacaggccccctcccgtcaatgagggaacggccacagcctcagcttctccttggcgatctgccacagccgggccagcccgtgcggctccacgatcaggaagaagatgatcagcccgccgaacaccatcagctggatgtgcgacacggtggcattggtgaatggcaggtgcagcagcgcggccagcgacggcagcacgttgtccaggaagatcggcagcagcaggatgaaggccgcgcccaggaacgagcccaggatgctgcccacgccgccgatgatgatcatgaacagcacgcggaacgacaggtccagcgagaagccgtccggctcgaccgagcccaggtagcagaacgcatagagcgcgccggccacgccgcagtagaacgagctgaccgcgaacgccagcagcttggtgcgcatcagtgggatgccgatcacctctgccgccacgtccatgtcgcgcaccgacatccatgcgcgcccggtggccgagcgcaccaggttcttggccgccagcgccagcaccgtgacgatggccagcacgaacaggtacttcttcagcggggtgtcgatggcgaagccgaacaggtccagccgctgcgccgtgatcacgcccgacgagctgttgttggagaaccaggggaacttggtcagcgcccacaccacgaagaactgcgccgccagcgtcgccaccgcgaggtagaagcccttgatgcgcagcgacggcaggccgaaggccacccccaccaatgccgcggaaaggcccgccatcacgaatgtcagcagcaccggcatgccttccacgcgcagctggaaattgtaggccgcgtaggcacccaccgccatgaaggccgcggtaccgagcgacagctggccggcatagccggtcaggatattcagccccagtgccgccagcgagaaaatcaggaacgggatcaggatggccgagaaccaatattccgacccgacgaacgggatcgccacgaaggccaccgccatcagcacggcaaagccgatgcggtcctggcggatgggaaagatctggctgtcggcgacgtagctggtcttgaactggccggcttcacgataaaacatggcaagtctcctgtgcgaagtcggtcagacgcgatcgatgtgtttctcgccgaacagcccttcgggccgcaccagcagaaacagcaaggcaaacacatacgggaaccacccttcgatgccgccgaagttgcccccgaacatcgactggaacaccggcgggatatagatctcggccagcttctccgaggcaccgatgatcagcccgccgacgatggcgccgggcaccgaggtgaagccgcccaggatcagcaccggcagcgccttgagcgcggtcagcgtgagcgcgaactgcacgccattgcgcgagccccacagcatgccggccaccagcgcgacgaaacccgccacgccccacacgatcgcccagatgttctgcagcgggatgcccagcgacagcgccgcctggtggtcgtcagcgaccgcgcgcagcgcgcgtccgaccttggtgtactggaagaacagcgccagcgatccgaccagcaggccggcaatggccgccgccgcaatatcgaacttggacagcacgatgttgaagttggtcatgatcgactcgatcggctcgtcgacgatgcccaggttgatcgggcgcacctcattgccgaacagcagcggccccaggccctcgaggaagaacgacagcccgatggtcgccatgaacagcgtgatcggcggctggttgaccagcttgcgcagcacgaagcgctcggtgctcatgccgaccaggatcatcaccacgaaggcgccgatcaccgcggcccacatcggcaggcccttgtccatcagccccaccaccgccagcgcggcgaagtacaccatcgcgccctgggcaaagttgaacacgcccgaggccttgtagatcagcacgaagcccagcgccaccagcgagtacatcaggccagagagcaagccgccgatcaggatttcaaagaagaacgtcatggttcagagcctcagtgcgaagtgcccaggtacgccttgatcacgtcagggttgcccttgacctcttccggcgtgccgtcgccgatcttcttgccgtagtcgagcaccaccacgcggtcggagatatccatcaccacgcccatgtcgtgctcgatcagcacgatggtggtgccgaactgccggttcacgtccaggatgaagcggcacatgtcctgcttctcttccacgttcatgccggccatgggctcgtccagcagcagcatcgagggctcggccgcgagtgcgcgcgccagttcgacgcgcttctgcaggccatacggcaggcgcccgaccggggtcttgcggatcgactggatctcgaggaagtcgatcacttcctcgaccttctggcgatggcgcatctcttcgttgcgcgccgggccccaccacagcgcgtgggcgaagagcccggtgcggaactgcgtgttgcgcccggtcatgatgttgtccagcaccgtcatgcccttgaacagcgcgatgttctggaaggtacgcgcaatgccctggcgcgccgcggcggtcgggtgcatctgcttgcgctcctcgccgcggaacacgatgcgtccctgctgcgggtgatagacgccgttgatcacgttgagcatcgaactcttgccggcgccgttggggccgatgatggcgcgcacctcgtgctcgcacacatcgaacgagatatcggtcagcgccttgaccccgccgaacgacagcgagatatgctgcaggtccaggatcacctcgccgccggtgcgcgcctgttcgccggtgcgctgcgcgcgctgcgtgccgggatgcgcgccgctgtcatccgtcagttccgcaggagacatcggacccgtgggtgcgatcgcgccgccgctgccggcaccgctggcatccgtgcgtgccgtccccgcccattcgcgctgccccgcgccttgccaggctacttgcgtcatcttgctgccctcgctcatgctgcgcgcgccgccaccggcaggcgcttcgcattgaccagcttcagcgtggccgacacgctgccctcgcgtccgtcttcgaacttgacgcgcgtctcgatgaactgctcggacttgcccgcatagagcgcctccaccagcacgccgtatttgtcggcgataaagccgcggcgcaccttgcgcgtgcgcgtgagctcgtcgtcgtccggatccagttccttgtgcaggaccaggaagcgtgccacctgcgatccggccagcatcgggtcgttggccaggtcggcattcacctggttcacgcattcgccgatcatttccagcacctcgggctgcgcggccaggtcgacatagccggcgtacggcaggtggcggcgctcggcccagttgcccacggcctcgaagtcgatattgataaacgcgcagacctggtcgcggtcattgccgaaggccaccgcttccttgatgtacgggaagaacttgagcttgttctcgatgtactttggcgcgaacatcgagccatcggccagcttgcccacgtccttggcgcggtcgatgatcttcaggtggccgtcggcgtcgatcacgccggcgtcgccggtcatgaagtagccctcgtcgttgatggcctcgcgcgtggcgtcatcgcgcttgtagtaggacttgagcaggcccacgccgcgcaccagcacctcgccgttgtcggcgatgcggatttccatgccgggcgccgccgggccgactgaatcgaacttgaccttgccgtccggctgcaggcacacataggcgcaggtctcggtctggccgtagaactgcttcaggttcacgccgatcgagcggtagaagcggaacaggtccggtccgatcgcctcgcccgcggtatagcccacgcggatgcggctcatgcccagcacattgcgcaacgggccgtagaccagcgcttcgccaagggcgtagcgcgcgcggtccgcgagcgataccggcttgccgtcgaggatatcggtgccgcagcgcttcgccacgtccatggcccagtggaacagcttgcgcttgatccagccggcatcctccatgcggatcatcacctgcgtcagcagcccttcatagatgcgcggcggcgcaaagtagtaggtggggccgatctcgcgcaggtcggtcatcaccgtttcgcgcgattccgggcagttcaccgtgaagcccgccaccatcgcctgcgcgtatgagaacagattgtcgcccacccatgccatcggcaggtaggacagcacgtcgtcgtccgcgctgagcttgtcgaaggcgcagccgttgcgcgccgcgccgatcaggccgtagtgcgaatggcacacgcccttgggcttgccggtggtgccggaggtatagaggatgatcgcggtgtcgtcgggctggccggcggcgatggcctcgtcatagaagcccgggtgcgcctggtcgaactcgcggcccagttcctgtagctgttcataagacatcagcgacggatggtcgtagtccatcaggccgcgcgggtcttcaaagatgacgtggcgcacggcgcggccggactcggccagctgcgcttccacttccagcagcttgtcgacctgctcctggtcctcgacgatggcgaactcgatctccgcatcgttgagcacgtagaccatctcgttggcgatggcgtcctggtacagcggcaccggcacaccgcccagcgcctgcgccgcggtcatggcccagtacagccgcgggcggttgtcgcccaccaccgccagattcatgccacgcctgaaaccgagtgcggccagcccgcaagccagtgccctcacctgctgcgccgcctgggcccagctgtatgtctgccagatgccgagatccttctcgcggtgagccggatgatccggccgctgctgggcgtgcgccagcagccatcgcgggaaggtcgtcgccgacgattcctgcatcgctgtctcctgtccctccggcgtggggatccacgcgcggtgtcaagcgtcggtccggtggttatacttggcttgttttgcctggcggcagtcatgccgcagcgcatcaagcccgtggtgccttgttttgcggcacttcccggctccgtggtgatcgtaagatagcccatgccatccacccgggttgtcacgccggtgacaattccgggttaatccctaccggagcaaattcaggccatgctgaacgattttgtcgaccgctgcgtgtgggcagcagacctgagtcccgagcagcgcgagcgcgtgcgccgcgccatgttcgtgcacgagtacacccagggcgactacgtctgtcacaagggtgacatggccgagcactggatgggcgtgctcgaaggcatcgtcaagatcaccacggtgtcgccctcgggcaagtccgtcaccttcaccggcgtgcccaccggcggctggttcggcgaaggcgcggtgctcaagtcggaaatccgcaagtacgacgtgatggcgctgcgccgctccaccatcgccttcctgccgcgcgacacttttctgtggttgctggataccagcctgccgttcacgcgcttcctgctgacccagttcaacgaacgcctgggacagttcatcgccgcggtggaatatgagcggctgctcgacatcgattcgcgcgtggcgcgcgcggtgtcgtcgctgttcaatgagcacctgtatccggggatcggcaagacgctggagatctcgcaggaagagatcggcctgctcgctggcatctcgcgccagcgcgccaaccaggcgctcaaggtgctggaacagcagggcctggtgcgggtggactacggcgtgatcgaggtgctggacctggaggggttgcggcagtacggcgaataacatggccagcgccatcgacgacgccacgctgcaggcctatcgcgagacgcactaccgcgtgctgggcgacctgccgatggtattgcgggtagaccaacccagcgccccgctggcggcgctgcaccgcgcgctgggcgtggcagcgagcgccttcattaccgccgccaacccgttcagcctgcgctgcgacgacgacaccaacgcaaagcgccagcaagcgctggcgcaagacttggcaaggatgggattgcgcgcaatcgaagccgccggagagcatccacgcaacggctggccggccgagccgagcttcctggtgccggggctgtcgctggcggatgcacgggcactcggcgagaaatacgaacagaacgcggtggtctggagcggcgcggacgcggtgccgcggctggtgctgctgcgctgaacgccgggccgggcggtggtgccggccggcgcttcagccggtgcggcggtcagtggccgtgatgaccgcgatggccgtgatgaccgtgatgaccgcgatgcccatggccgtggtggcgatagtgatgatgccgatgatagtggtgatggcggccgcgccactcatggcggccataccagcgacggccatcccaataacggtcgccatgccagccgtgatggcgcggcgcatacaccacgtgcggcgggggtgccacatagaccggggccggcgccgcatagaccggcgcgccgatctgcacgcccacgtccacatgcgccatcgccgagcgggccgccagcagggacattgcgcccgcgagcagcgcagcaaagagaatcgggtgagccatggagcttgttttgtcgtaatgggaatgggtgcactctaccgcgcattcctgttaccggatgcggcggagtgtttcggcatataacgccgtgtaagcgggatttggcggcaaccggaaccggccccggaaaaagctgcggccgcccgcaggcggccgctgtaccacgcggcaagtgccgggcagcttacttgctatagacgtacacgccgcggccagtcttgcggcccaggtagccggcagcgaccatctcgcgcatcagcatcgccgggcggtacttcggatcggcaaactccgtgtacagcacttccatcacggccagcatggtgtccaggccgatcatgtcagccagcgccagcggcccgatcgggtggttgcagcccagcttcatgccttcgtcgatctcttccggcgaggccaggccttcgcccagcacgcagaaggcctcgttgatcatcgggcacaggatgcggttgacgacgaagcccgggctgttcttgaccgtgatcgggtatttgccgagctgcttcgacagggcctcgacggcggcgtgggtggtgtcgctggtctgcaggccgcggatcagttccaccagcgccatcaccggcaccgggttgaagaagtgcatgccgataaagcggtcggcgcgcgaggtcacggcagccagcttggtgatcgagatcgacgaggtgttggacgcgatgatcacgttctcgccgacgatgccgtcgatctgcttgaggatcttgaccttcaggtcgtagttctcggtggcggcctcgatcacgatatcggtggccttgagatcgtcatacgaggtgctgcccttgatgcgcgccagcgcgctggccttgtcggcctcggtcagcttttccttcttgatcagacggtccaggctgcttgccacggtggcgacacccttctgcacggcggcatcgctgatgtcgaccatcaccacgttgagacctaccactgcgcaggcctgggcgatgccattgcccatggtgccggcaccgacgatgcccactgtcctgatgctcatcttgtcttcctctgcttggttggattgctgattgatcggttcaggcgcggctcaggcgccctgctcgcgcagcgcggcgatgatgcgctgggcatggcccttgagctgttccgggtcctgcatctcgcgcgcatggccgcgcagcgcgctgtcggcatagcgcggcacgatatggaaatggacgtgcggcacggtctggcccgcggccgcgccgttgaactggccgatggagatgccgtcgggcgcaaacgccgcgcgcaccgcgcgcgccacgcgctgcgtggcgacaatggcggcctgcgcgccctgctcggacaggtcgaacaggttgaccgcggcttccttgggcaccaccagcgtatggccgtcggcctgcggcatgatgtccatgaaggcgatggtatcgtcgtcctcgtagaccttgatgcacggcagctcgccgcgcaggatcttcgcgaagatattggtcgggttgtactgggtgtccatgatctttggcttgcggttgtctcgaatacgtttgccgtggcgcggccgccggcacagccttcgagtgtaacgcagggcgacccctcactgcggccgccctgcgcggtaatcgggcactgcttgctgcgcggtgccgccggctctacatattgcgccggtactgcccgcccacttcgaacagcgcatgggtgatctgccccagcgagcaaacccgcaccgcgtccatcagcaccgcaaatacgttctggttgtcgatcaccgcctggcgcaactgcgccagcatggccggcgcctcggccgcgtgggcctgctggaacgcatgcaggcggtcgagctggctctgcttctcggcctcgctggagcgcgccagctccagcttctgcggggtcgggtcgccgtccgggttgcggaacgtgttcacgccgatgatgggcagcgtgccgtcgtgcttgagctgctcatagtagagcgactcttcctggatcttgccgcgctggtagccggtctccatcgcaccgagcacgccgccgcgctcggcaatgcgctcgaactcctgcagcaccgcctcttccacgaggtcggtcagctcctcgatcaggaagctgccctggttggggttctcgcacctggccacgccccactcgcggttgatgatcagctggatcgccagcgcgcggcgcaccgactcgccggtgggcgtggtgatggcctcgtcgtaggcattggtatgcagcgaattgcagttgtcgtagatcgcgatcagcgcctgcagcgtggtgcggatatcgttgaagtcgatctcctgcgcatgcagcgagcggcccgaagtctggatgtggtacttcagcttctggctgcgctcgttggcgccgtatttgtcgcgcatggtcacggcccagatgcggcgcgcgacgcggcccagcacgctgtactccgggtccatgccgttggagaagaagaacgacaggttgggcgcgaaatcgtcgatatgcatgccgcgcgccaggtacgcctccacataggtgaagccgttggacagcgtgaacgccagctgcgagatcgggttcgcgccggcctcggcgatgtggtagccggagatcgacaccgagtagaagttgcgcacctggtggtggacaaagtactcctggatatcgcccatcaccttgagcgagaactcggtggagaagatgcaggtgttctggccctggtcttccttgagaatgtcggcctgcaccgtgccgcgcacgttctgcagcacccaggcgcggatcttggcttcttcgtcggcggtgggctcgcgctggttgtcggcgcggaacttgtcgagctgctggtcgatggcggtgttcatgaacatcgccaaaatggtcggggccgggccgttgatggtcatcgacaccgaggtgctcgggctggtcaggtcgaagccgtcgtacagcaccttcatgtcgtcgagcgtggcgatcgacacgccggagttgccgaccttgccgtagatgtccggacgcacatgcgggtcttcgccatacagcgtgaccgagtcgaacgcggtcgacagccgcttggcatccataccttcggacaccagcttgaagcgccggttggtgcggaaggcatcgccctcgccggcgaacatgcgggtggggtcttcgttctcgcgcttgaaggcgaacacgccggcggtgtacgggaagctgccgggaacgttctcgcgcatcagccacttcagcacctcgccgtcgtcctcgaagcgcggcagcaccaccttgcgcaccttggtgccggacagcgtggtcgtaaccagcccggtgcggatctcccggtcgcggattttcactacgtactcgtcgccgctgtaggcttcgcgcatctgcggccacatcgccagcagcttgcgctcgacctgaccgagggcgctgtcgcgctccgccgccagcgcatccagcgccgcgccatcgccttgcgcggcctgcaccatgcggctcgattcacgcagttgctggcgctcgcgtgcaatgcggctctgctccatcacgcggcggtggtagccgcgcaccgtgtctgccagttccgccaggtagcggctgcgcgccggcggcacgatcacattctggccggtggagatgcgccccgcctgcgccggcagcacgcccggctgcagcttcaggccgcgttcggccagcgccgcgcgcagcccctggtacagcatggtcacgccatcgtcattgaagcgcgacgcctgcgtgccgtagaccggcatgtcctcggccttgccgtgccattgctcgcggttgcgctgcacctgcttggccacgtcgcgccacgcgtcctgcgcgcccttgcggtcgaacttgttgatggcgacgaagtcggcaaagtccagcatgtcgatcttctcgagctggctggccgcgccgaactcgggcgtcatcacatagagcgacagatccacgtgcggcacgatggccgcgtcgccctggccgatgcccgaggtctcgacgatcaccaggtcgaagcccgccaccttgcacgcggcgatcacgtccggcagcgcctgcgagatctcggagccagcctcgcgcgtggccagcgagcgcatgaagatgttcgggtggttgatcgcgttcatgcggatgcggtcgcccagcagcgcgccgcccgacttgcgccgcgacgggtcgatcgagatcacggcgatcgacagcgcatcctgctggtcgaggcggaagcggcggatcagttcgtcggtcagtgaagacttgccggcgccgccggtgccggtgatgccgagcaccgggatcgatgccgctgccgcttgcgcatgcatcgcctgcaccagcgccggatcggccttgccgttctccagcgcggtaatcagctgggccagcgcgcggcggtcgccgccggtgacgggttcgagcgaggccggcgcatagcgcgacaggtcgatgtcgcagcgctgcaccatatctgcaatcatgccggccaggcccatgcgctggccgtcctcggggctgaagatgcgcgccacgccgtaggcctgcagctcgcggatctcgtccggcacgatcacgccgccaccgccgccaaagacctgcacgtgctcgccgcccttctcgcgcagcaagtcgaccatgtacttgaaatattcgacatggccgccctggtagctggaaatcgcgatgccctgcgcgtcttcctgcagcgccgccgtcaccacttcctcgaccgagcggttgtggccgaggtggaccacctcgcagccatgcgactgcaggatgcggcgcatgatgttgatcgaggcgtcatggccatcgaacagcgacgccgccgtgacaaagcgcaccttgttgaccggaccgcggccttgcgcggtgggcttgggctggggcgcaccgcggcgcacatcatgcacatcggaaaggtcggtcattgtctccaccgtctgtggtgttggctgccaccgcggcgtgcgcctgaagtaccgctctgtgccggcttggccgcaaacgcgcgggctgcgcccccgggtcggggccgatcgattatatgacgttgacgtttaacgtaaagcaatggggcggaaccccgagcccggcgtgcatgggacggggctgtccctatagagtaggcgcccgcggcaggcgccgcgcaagcatccgggcaaacaaaaggccaccctcaggtggccgttccggcaaagcttgagtggtccgctcaggcccagatcctggggcactccccgaacgcatccgtgctgtgctcctccacccggtgccgcatcgcccgcagccacgccaccagccgccgcagcgaccacggcgccggcacctgtgccagcgtaaagcgcgcgcccgcgccatcgcccgacagccacacccggtagccctccggcaacgccagctcagtgcccggctccagccagatgtcgttgggactgccttccaccgtcacccacaacttgcccgccaccgcgcagacggtctgcccgtaaccggcgcgccagctcactggcagcccaggctcgtccagctcgaaagtccgtagttcgcgcatgtcccactcctcatagccggcggtcgcgtccggcgccggcccccgtggatgccgaatgatcacggtagccggcgccttcctccgccacgcttccattattcgcatccctcactacaatcccatgtacagttgtgaacagttttcgatgaactgttcagtagttttccctgacagttgtcgcttgtagcgatctgcgcctaccggcttcccccggctgcctgcccatgaaactaatcttagatgcttccaccggaattccactgaccgagcagatcgttgccggcgtgaaagcgtggatcggcaaccgcgaagcacggcccggcgcacgcctgccgtcaatccggcagttggcggcggagaacggcatcagccgcttcccggtgatcgaagcctatgaccggctggtatcgcaggggctgctggattcgcgccagggttcgggcttctatgtggcggacagcccgctggcggggcgctcggcgtgcggatggtccgatccgagcctggccgaggatctttccgaccacatcctcgagcagttcaaccaccccagcggcacgctcaagctggccgggggcttcgtgccggagacctggcgcgacgtcgaggggctgacgcaggcgatccgcgcgatctcgcgcaatgagatcgacagcgtgatccactacgccacgccgatggggcatccggaactgcgtcgccaggtgttgctgcgcgtgcgccagctgggcatcgccgccgaactgccgcaagtgctgatcaccaccggtgccagccaggcgctggacctggtggtacgccatctgctcaagcccggcgataccgtgttcgtggaagatcccggctactacaacctgttcggcctgctgcggctgcatggggtgcagctggtgggcgtgccgcacacggccaacggccccgacccggacgccaccgaggcgctgctgcgccagcacaagcccaagctgttcttcaccaacagcgtgctgcagaacccgaccggatcgacgctggcgccgccggtggcattccggctgctggagctggcgcgccggcatggcttccgctttgtcgaggacgatatcttctcggacttccagacccacttcaccgaccggctggccacgctggaccagcttgagcacgtgatctacatcggcggcttttccaagacggtgtcggcctcgctgcgggtcggctacctggtggcggacaaggcgctggtcaaggacctggtcgatgtgaaggtgctgaccagcgtggccggttcgcacttcgcggaagcagtcacggcggcgctgctggagcgcggcggctaccgcaagtatgtggagcggctgcgcctgcgcgtgcgcgaggcctgcgccaatgccgtgcggcaactgaccggcaacggctgggaggtgttctgccagccgtccggcggcaacttcctgtgggcgcgcccgcccggcatcgaggattcgcgcgaactggtgacgctgggcgaggaatacggcgtgacgctggccccaggcaactacttccgcccgggcggcgagacctcggcatggatccggatcaacgccgcctatgccaacgagccgcgcgcggtggccttcatgaaggccgcggccgggcgcggcggctgaaggcgctcagccgccgtggttatgcagcacggcattacgccgcgcgtagccgaagtagatcaccagccccaccgacagccacacgaggaaggcaatccaggtcagcgcctgcagatgcgccatcaggaacaggcagaagccgatcgacagcagcggtaccaccggcacgcccgggcagcggaatgcgcgcggcagttccgggcgcgtcttgcgcagcaccagcaccgccaccgagatcagcgtgaaggccgccagcgtaccgatattgatcagctcggccagcacgttcagcggcacgaaggcggcaatcgcggcaaacacgatgccgacgatccaggtggcgaaatacggcgtggcatgcaccgggtgcacggatgacagccgctctggcagcaggccgtcgcgcgacatcgcaaagatcacgcgggtctggccgtaggtcatcaccaagatcaccgtggtcatgcccaggatcgcgcccaggtcgacaaagcccgccacccagttctggcccgcgaactgcagcgccagtgagaccgggtggtccacgccggcaaacttcgcgaacggcacgatgccggtcatgatggcggccaccaccacatacagcaccgtgcacaccgccagcgaaccgatgatgccgatcggcaggtcgcggcgcgggttgcgcacctcttccgcggcagaggtcaccgcgtcgaagccgataaaggcaaagaacaccagcgccgccgcattgaagatgccggcaaagccgaatggcgcgaacggctgccagttggccggctgcacatgccacacgcccaccgcgataaacagcagcaccacgccgatcttgaccgccaccatcaggttgttgatgcgcgtggattcgcgcacgccgtacgacactacccaggtgatggccagcatgatcaggcacgccggcaggttcagcatggacttcacccccggcaccgagcctggcgccgcggtcagcgccgccggcagtttcagcccgaagcccgccatcagcgactggaagtagcccgaccaccccaccgacacggcggacgtggccagcccgtattccagcagcaggtcccagccgatcatccacgcgacgatctcgcccagcgtggcatagctgtaggtatagatcgatcccgacaccgggatcgccgaggcaaactccgcgtagcacagcgcggcaaagccgcacgccagcgccgcgatcacgaacgacaccgtcagcgccggccccgcggtcagcgcgccggtgccggtcagcacgaaaatgccggtgccgatgatggcgccgatgcccatcatcaccaggtcggttggacccagcaccttcttcaggccgtcatcgcgcgcgacggccagcatcgcgtcgatgtccttggtgcggaacaagctcattcagactccatgcaactgtggccgggcacgcggcggcaagccgcgcgggcccggaaaaagggcggtagtttacgcccgccgcggcgcgaaggcgtcacattgcgcgcccgcgcgcggcaggcacgtcatcgaatgatagaaaaggccaggctggccggcactgaccgcaggcaaagtcagccgccgcagccgggcgccgacaggatgccgtccacgcgcgccagggcggcggcaagcggatcgagcgccagcagtgcagcgccggcaagggccagtgccgccagcgctgcaatcctcgcgcgcagcggccacggccccgccagggccgccagccccagcggggcgagagccgcgcaggcaagaaggagccgcggcagcatcggcacttcagcggctggcagcctcgggaaccgcggcgtgtgccgggcccttggcaagtgccggcaacggccccgcgcggcgcaggccaagccacgagcacgcggcggagcacagcgtcaccgccaccagcgccgtgatgctgtgctggtagctgcgcgtggcatcgaacgaccacgcccccagctgcaccgtcaggaaggcgcccagctggtgcccgaggaacagcaggccaaacaccttgcccttgatccggctgccgtagcgctcgaagcagaacatcgaggtcaggatcaccgtgcccagatagctggcgccaaagccgaccgcaaacggcagcacgcccaggcccggcaccagcagcaacagcatcgatgccgagcgcagcgcgtagaacgcggccagcagccggtgcttgtcccagcgcagcgccagcgcgccggagaccaggccgctggccagctccagcgcgccgagcgtgctcatcgcatagcccatcgccagccgcggcacgccctgcccctgccagtacgcgatcaggtgcacgtcgataaaggccatggtggcgccgcagccgaagaagccggccgccagcgcatagaacaccgggtcacgccgcaccaccgtccatgccggcacatcggccccggccgtgcatggcgccggtgcggacgccggctcccagcgcgaagtcagccacaaggcgccggccaccggcaacgcaaacaccgcaccggccacgccgaacgccgtgatccagcccgcctgcggctgcagccagatccacagcggcgacagcacgataaagccgatcgcggtgccgttggtaaccaccgcataggccagccccttcttgcgctcctcgaacagccggtccaccaggatgcccatcggcacaaaggtcatggccgccagcccgaacgcaccggcgaggccgaacatcagcacgaagaacgtcagcgatcccggccacagcgccgcgccacccagcgcaatgcctgccgccagcgccccagcggccgcggtgcgcagcgggccgacgcgatcgctgagcgcgccgaccaccggcgacatcagcccggtggcgagcataaagacactgccggaccaggcaaactgcgcacggccctgcccgaagtgcgtggcgaggtcgacgaagtacacctggtagaggcccttgaccgcggtcgagacaaacatcgcggcgaagccgatggcgaccagggcaagggtgatggcggggatgcgtgtgcggggcatgtcgatctctcagtcgtgcgaggcctggtgccatgctaagccagcccgccctccggccatggcaaccacccggcccagaaaagcaacttttcggccatccctgttgtgttgtgctggattcgcgcgagaatggcggcatcgtaccgctcgctcttcccttgccgcgatgactaccgcttatctcctggtgcttcccaacgtccacatgctcgaccttggcggtccgctgcagatcctggccagcgtatcggaactgggtattgggccactcaaggtgcgctgcgtcgggccacattcgagcgtcccttcgttccaggggccggcactgagccaggtcgaacgcctgcctgcacgactcgcctccggcgatgtggtgctggccatcggcagcaaacttctggacacactgacccgttcgccggcatggcacgatagcgtgaattggctgaaaaggtctttcgccgacggcaggaacgccgacgtacaggttgccgcggtctgcaccggtgccttcctgctcggcgccgccggcctgctcgacggccgcctgtgcaccacccaccacgcccatacccgccgcctgcgcacgcggcaccccgccgcctcggtcatcgagaaccgggtcttcgttcgcgatggcaatgtgtggacgtcagccggcgtggcttcgggcatcgatctggcgctgcgtctggtggccgatgcctatggcgacgaagccgccatcgccgtggcgcgcgacaacgtggtgcccttccgccgcttcggcggcgatccgcagctcgccccgcagctgcgcgcgcgctcgcacggcaacccgctggtgcatgcggtacaggacgcgatctcgcgggaactcgacaccaatgttgccgacccgcgctttgccgaccgctttgccatcagcgtgcggcacctgtcccgcgtgttccacgaagaaaccggcctcacgcccaagcagtaccagctcacgctacgcatggcgcgcgcgcgcaagctgctggcgtcgtcatcgttgccggtggaagagattgcgctgaaaagcggcttcgccagcgtgcaggccttccgcgcgtgctggaacaaggcagagccggccacgccgaaggcctaccggcaagcccgcgccggcagcgcggaatgaccgcgctcaggtgtgcatcaggatattgaccagccggcccaacggatcgcgcacgtagaagcggcgcacaccccatggctcgtcggcgggaccgtactcgatggcgaagccgccggccagcatgcggcaatgcgcctcgtccacgtcatcgacctcgatcgacaggtccggcaccggcgtgccgttgccgccttccgtggcgaaactgagctggacggtcatggtcgaggtgctgccgtaggtccggatccagccgtggtccatcaatacgtccaggcccaggatgtcctggtagaaagcgcgggcactggccgggtcggcgaccgcgatgttggcaacgatccggttgaccttcatgcccgctctccccttacttcgccaccggcatggtgaactcagcgcccttggcgatcgaatccggccagcgctgcatcacgctcttgtagcgcgtgtagaaacgcacgccctcttcgccataggcgtgatggtcgccaaacagcgatcgcttccagccaccgaacgaatgccaggccatcggcaccgggatcggcacgttgatgccgaccatgccgacctggatctgccgcgcgaacgcacgcgcgatgccgccgtcgctggtgtagcacgacacgccgttgccgtattcatgcgcattgatcagcgccaccgcttcggcaaagtcatgcacgcgcactaccgacagcaccgggccgaagatctcttccttgtagatcgtcatgtccggcttgacgtggtcgaacagcgtgccgccgacatagaagccgttctcatggccgggtacggtatgaccgcggccatcggtcaccagcatcgcgccctcttccacgcccttggcgatatagccctccaccttcgccttgtgcgcagcggtcaccagcggacccatttcggcatcggactccatgccgttgcggatcttcagcgagctcgcacgttcggcgaggcgcggcacgagcttgtcagcgacatcgcccacggccacggcgaccgagatcgccatgcagcgttcgccggcagaaccatacgcggcaccgatcagcgcatcgaccgcctggtcgagatccgcatcgggcatcaccaccaggtggttcttggcgccgcccaatgcctgcacgcgcttgccgtgtttggtgccctccgtatagatgtactcggcaatcggcgtcgaaccgacgaacgacagcgcctgcacatccggatgcgccagcagtgcatcgaccgcttccttgtcgccctgcacgacattgaacacgccatcgggcaaaccagcctggcgcagcaggtcggcaatcagcaggctcggcgacggatcacgttccgacggcttcagcacgaaggtattgccgcacgccagcgccaccgggaacatccacatcggcaccatcaccgggaagttgaacggcgtgatgccggccaccacgcccagaggctggcgcaggttccagttatcgatgccgccgccgatgttgtcggtgaagtcggtcttgagcaggttggggatgccgcaagcgaattccaccacctcgatgccgcgcgtgacttcgcccctggcgtccgagaacaccttgccgtgctcgcgcgtgatcagcgcggccaggtcgtcgtggtgctggtcgagcagctccttgaacttgaacaggatgcgcgcgcggcgcagcggcggggtgtcggcccaggcggggaatgccgcatgggcggcggcaacggcgtcggccacgtcctgcgtggtgccgagcgccacgcgtgctgcgacttcgccggtggcggggttgaacacgtccgccaggcgctggccgccggcgcggcgcacagcgccgccgatgaaatggtggatctcggccagttgccggttttctgcgatgctcacttgggatttccttcgatagccgcggcacgcaattcagcgcgcccccggcatgcaatcagggaggccggacccgcaggtccggcggcaatgcgatgcggcgcgcgccgcttacttgatgtcctgcagcgccttcttcaccgtatcgaacagttccccgatctgggcttcagagatgatcagcggcggcgagaacgccaggatgtcgccggtgtagcgcaccagcacgccgagttccaggcacttcaggaaggcctcatacgcgcgcgcgccgggctggccgggacgcggctccagctcgatgccggcgaccaggccatagttgcggatgtccttcacgtgcggcgcgccgcgtacgccgtgcaccgcggcttcgaacaccggcgccagttcggcggcgcggccgaacaggttttcgcgctggtacaggtcgagggtggcaatggcggcagccgcggccagcgggtggccggagtaggtgtagccatgcagcagctcgatcgcgcccggcgcagccgaattgaccacggtgtcatgcacttcgcggcgcacggcgacggcgcccatcggcaccgcggcgttgttgatcgccttggccatggtgatcaggtccggcgtgaccttgaagcgctcggccgcggtggcggcgccgaggcggccgaaggcggtgatgacctcgtcgaagatcaacaggatgccgtgcttgctggtgatttcacgcagcttttccaggtagccgaccggcggcaccagcacgccggcggagccggccagcggctcgacgatcacggcggcaacgttggacgggtcgtgcagcgcgaggatgcgctccagctcatcggccaggtgcgcgccccattgcggctggcccttggagaaggcggcctcggcgatattcagcgtggccggcaggtggtcggtgcccggcatcaggttggccgagaacgccttgcggttggggccgatgccgcccaccgccatgccgccgaagcccacgccgtgatagccgcgctcgcgcccgataaagcgcgtgcgctggccttcgccgcgtgcacggtggtaggccagcgcgatcttcagcgcggtgtcgaccgactccgagccagagttggtgaagaagatgcggtcgagcccctgcggcatgatcgcggccaccttggtggcggcctcgaacgacagcggatggcccatctggaacggcggcgcatagtccagcgtggcggcctggcgcgctaccgcctcggcgatttccgtgcggcagtggccggcggccacgcaccacaggccggcgcaaccgtccaggatctggcggccgtcgtgggtggtgtagtacatgccgctggccgacgccagcaggcgcggcgccgccttgtactggcggttggcggtgaagggcatccacagggcatcgagatcgggaatcacggtcttggcggcgtccatacgtcctcctagggggaatcgggtcggattggctggtggcacgctgactggcagcgcggcggcaatgagggccactctaccggcggcgtctggccgacaaaatatacagtccggacaagactgccttaccgtgcagtttgaacacgccaaaccgtacaggcaagcgtcatcggggtgccgccagcccgccgctgtgccacgaccgctctggaccgcggtacgccgtcccacgctgcactgcggcaaatttcgctttgcggaagaccaccgcatcctggcctgcctccagccgctaaactgtacaggttcacgcctgcccgagtgcctgatgctgaccctgaacctgacccgcacccgccgcgacggcgacaccctgaccgagcagatcgtcgccggcatcgccgcactggtcgagcagcgcgcgctgcgcgccggcaccgccctgccctcggtgcgccgctttgcgcagcaccaccacgtcagcaccttcaccgtggccgaggcctacggccggctgacggcgctgggctacctggcggcgcgcccgggctcgggctatacggttgcacatcgccatgccccggccgggcacgcgcgcgcgccgcaatgggaggcgccgggactgaacgcagcgtggctgctgtcggatgtgttcgccgaccactcggtgccgatcaaggccggcgccggctggctgcccggcgactggctcaacgaggaagggctgcaccaggccatgcgcgcctcggcgcgggtgccggcggcgcagctgtcgggctacggccatccgtatggctttgctccgctgcgcgagcatatcgccgccggcctgggccagtacggcatcccgctgcaggcgcagcaggtagtactgacgcagggcgccacgcaggcgctggacctggtggtgcgcacactgctgcgtgccggcgacagggtgctggtggaatcgccctgctactgcaacctcttgcagatcctgcggctggcggggctgcgcgtggtgggcgtgccgcgctcggcggcggggctggataccgacgcgctggacgatgccatccgcgcccatgccccgcgcgcgctctttatcaataccgtgctgcagaacccgaccggcgccagcctgagcagcatgaacgccttccgcgtgctgcagctggccgagcagcaccggctgctggtggtcgaggacgatatctaccgcgagctggcgccggccggctcgccgatgctggcggccatggacgggctgtcgcaggtggtctacatcaatggtttctccaagaccatcacgccgtcgctgcgtgtcggctatctggccgccagccccgacctggccaaggccttcgcgcgcaccaagatggcggtcggcctgacctcatcggaagtcaccgagcggctggtctactcggtgctgaccagcggccactacggccgccatgtggcggcgctggccgagcggctgcgtgcgcagcaggatcgcgtgacggaaaagatggaagcccacgggctggaagtgctgctgcgccccgagggcgggatgttcgcctgggcgcgcctgaccgaggcggcgcaggcgcggctgcaggccagccgccgcggcgggccgctacacggcaaccgcctcgccacgctggcgctggagtatggcatctggctcgcgccagggtcgtatttcgagccggacgagaccgattcgccatggatccgcttcaacgtggccaccggcgatgcgccacagctgtggcagttcttcgaccgcctggcgcaggcgccgcgcgcggcgtagcacccgggcagcatggagcggtcagctccagaggcgctcgacgagccagcccgcggtggcgcagagtcccagccaggcggtcaggcagatagcgataaagcgataactcatcttggaatggacaacaaagtcgtggaggcagtgtgaatttttcgttaaatcatacatccattcatgaatgtatgtaaggacagcgtggattccccgctggcagccagggtctatttgtaccgcagggagcacacaaagtacgcgccagctgtccctgcagccgtcagggacgcggccgccgaagcgccggggctctgctacacttgagcctgcattgccccacacggggtgacgatttcagctctccagcgcagcagaaccagaccatgcatagccacgacctgtccgcctggacccacagccacgccttcgacgccggcaaccgcgccgccgaacgcggcacacgcctggtgatggcgatcaccgccgccactatggtggtagagatcgctgccggcctttggttcaactcgatggcgctgctggccgatggctggcacatgagctcgcacgcgctggccatcggcctgtcggccttcgcttacgccgccgcgcgccgctacgccggtgaccggcgctttgccttcggcacgtggaagatcgaggtgctggccggctttgccagcgcggtgttcctgcttggcatcgcggcgctgatggcggccggctcggtcgagcggctgctcagcccgcaggacatccactaccgcgaggccatggccgtgaccgcgctcggcctgctggtcaacctgggctgcgcgctgatcctgggcggccatgcgcacggccacgaccacgggcacgaccatggccaccatcaccacggccacgaccatgatcacggccacagccaccaccacgacatcaacctgcgcgccgcctacatgcatgtgctggccgacgccgcgacctcggtgctggcgctggtcgcgctggccggcggctggtggctgggctgggcgtggctggatccggtgatgggtctggtgggcgccgcgctggtcggcaggtgggccgtctgcctcctgcgccagagcggcgccgtgctgctggaccgcgagatggaccacccggtggtggaagaagtgcgcgaggtgctggcgggcctggaccctgccgacgccaacggcgaggagcgcaccagtgtgaccgacctgcatgtctggcgcgtgggccggcagcagtttgcctgcatcgcctgcctggtcacgcacgatccggcgctgaccccgcagcgcgtgcgcgaggcgctatccgtgcatgaggaactggtgcacgtgacggtggagatcagccgctgcgagggcgcgcactgaggcgtgccagcggtgcttgcgggttcagtccaactcgcaccacatgcatagcggcggcgtatcggtatggcggtggaattcgctcgatgacatgacctcggccggcagcttcgcggccggcaccagcgtaaaaccgtaacgcgagaaatagctcgggcagcttgaggccagcagcaccgcgcgccgcgcgccgttggcgcgtgcgcgcatcagcgcggcgcgcaccacatgcgtggccacgccctggtcgcggtgttccggcaatacggcaacgctgcggatcaccacggtctcgccgaaacgctcgccggcagcgcaagcaatgatctgcgatccaaggatggcgacgtggaagtgctcgagcaagcgggccacatcgtccacgggcaggccgcagcgttccagcacgctgcccacggctggcgcgtccgagggcatggccgcccggatccgcaagtccttgatcatctggagcctctctttctcacatcacctcgcgacggggacaccatggaagcccggacatggttgtgccgccatccggcggcacgggttgcacgcaggccatgtggcctggcaggcaacattacccgattcagtggcgttgttctattggggaagtaacggaacagaggtgtccgaaatggccctcgcgatcacggcaactacgcgcaccacgacatggctgccgtgcatgaaaggtccctgtgacacgcgtatgaaaatgggggaaattgcgcgggcgcacgcaagactgcccggcaacttgtgccaggcaaagaaaactggaggcggggatacggaatcgaaccgtcgtatacggctttgcaggccgttgcatcaccactctgccaccccgccgctgacgccgcgtctgtgcgacgctacgtgctgcgggccgcagtgtagcgggaaatggaaatctttgcaggagacggcaaggctagccgatgccgcccatcgcggactggatgtagttctgcaacccgaccttgttcaccagttccagctgcgcctcgagccagtcgatatgttcctcggtgtcggcaaggatatcgaccacgatctcgcgcgagacataatcgccgactgactcgaagaacttgatcgcttccttgcagctggcctgcgacacctgttcgagcttcaggtcgcagccgagcatctcctcggtgttctcgccgagcagcagcttgtccaggtcctgcaggttgggcaggccatcgagcagcaggatgcgctcgatcagcttgtccgcgtgcttcatttcctcgatcgattcctcgtactcgtgcttgcccagcgcaccgagcccccaatgccggtacatgcgggcatgcaggaaatactggttgattgcagtcaactcatggcgtagctggccattgagcaactggatcaccttcttgtcgcttttcatgactgcccccaacgccccctcaaaaccgatggacccactctcattttcgtaatcacgaaaaccccgcagtgattatcccgccgcggacttcatggtagtccggcaagagcggacatcaagcagattcggcctcgccgccgcattttcaccgggttttcacgcgccattgcggatgcgaataccaatggtttccattcggttttcaaaagcgcttcgctcggcatcgtgcaaatagaagagcgggcgcacacggcaattgccgcgccgcccgccatcgggagccacccgtgaaaatcagtcgagcttcgcgcccgaatccgccaccagcgtcttcagcaccggccagtcgcgcgcatacagcgcctgcgcctcggccggcgagctgcccaccgtgcgcagccccagcgcgaccagtcgctcctgcatgtcgggcgcctgcaggatggcgcgcacttcgccttcaagcctggcgagaatcggcgcgggcacgcccaccggcgccaccaggccgatccagccgacggtcttgaaggcgctgtcctgcatgccggactcagcgaaggtgggcatgtcaggcagcgcgctgctgcgctgcgtgccggtcaccgccagcgccttgagcttgccgctctggatatagggcttggcggtcaggatgctggcaaagccgaactgcacctgcccgcccagcaggtcctgcatcatcggcgcctcgcccttgtagggcacgtgcgcggcctggccatgcaccagcttgctgtagtaggcgccgctcaggtgcgacagcgaacccacgccccacgaggcatagctgagcttgcccggccggctgcgcgcgtaatcgcccagttcgcgcacggtgcgcgccggcaccgacggatgggccaccagcaccagctgcgcatcggccagcacgctgatcatggtcaggtccttgcgcgggtcgtagggcagtttctggtacaggaactggttggtcagcaccgactgcgtcagggtcatcaacaacgtgtagccatccggcgcggccttggccacggcgtcggtgccgatgatgcccgaggcgcccgccttgttgtccaccaccacgggctggcccaggcgcttgctgagcttttcgcccatggcacgggcgatggtgtcagtgccgccgccggccacataaggcaccacgatgcggattggtttggcgggataggtctgtgccgcggcgggcagggccaggctgagcgaaagcccgccaatcagcccaccagcggccagcgcgagcgatgcgcgtcggttcatgtcgtctccaggtcgtccttatggttttgggggacaacgttagctggcttgagaaattacgtccaatgcaatatttttcagtttttgatgcaagaatgattaattcatgggtctaaggcagctgcatcacttcgtcacgctggtcgagcaaggcagttttgcccgagccgccggcgccctgcacctgtcgcagccggcgctcacccgcagcatccaggcgctggaagcggacctggggccgctgatcgaccgcagctacggcaaggtgcggccaaccgcggcgggcatgctggcgctcgaacgcgcgcgccgcatgctgcgcgaacagcgcgagttgcggcgcgacctgcaactgctggaggaagtagagatcggcacgatccgcgcgggcttcgggccgttcgcggcatcgttcctgctcgatcccgtgctcgagacgctggtgcggcgctacccgcatctgcgcatcgacctggagaccgcggacacgccggccatgcggcgttcgctcgaagcggaacgcctcgatgtctttgtaggcgaaagccgcagcctggcggaactgggacacctgcagattgaccggctgccggcactggaaacggcattcttcgtgcgcagcgggcacccgctggcgcggcagcgcgaagtcaccctggccgagctgcgcgcctatccggtggcagggacgcggctgccggcgcatatcctgcgcttcttccggcaggcactgcatcaagccagcggtggcagcggcccggtttccgaggacgcgcccgggctgatgaccgtcacctgcaacgacatgcacgcgctgcgctcgctgctgctggccgtcgatgccgtggcgctggtacccgtggcgatgatggccgaggcctgcgcgcaaggcttggccgtggccctgccgatgcacccgccaaccgagctgagggcgcagtatgggatcgtgtcgctggccgggcgctcaccgtcgccggccatgcgcgtcttcgcggcgctggtgcatgaagcagtggcgcaagccggcggcggtgccgcgctgtaggcccaggtcatggcccgggcgttggggattcagccagcagcgaccgcgggctgcacagcttcgacacgcgacggcaggtgcgcggccagccggcggcgcgagcgctcagggttgtccacgtacaggccggccagcgacgacaccgatgcgtcgatggcgaggatcgcaccgcgctattcgcgtggcctgcgcaccacgctgctgctgctggaagccggccgccggctgctgcgagcgcacgctggaacaggtctcgatccaggaaatctgcgcgcaggccggcgtcacgaccggcgcgttctacagccgcttcgaaggcaaggatagctatttcagggcgctgcaagccctggtgctggccacgctgcgcaagggcatggccgagccgcttgcgcaactccacccggcgggcgcctcgccggaactggaactgcgcatccgctttgcgcaccaggcgctggccggcacgctgctgtacgcgctgatcaaccgcgacagcacctttgcgctgtcggaccggcggctggatatggagatggcacgggcgttcctgctgtacgtggcatagccacgcgccgccaatgccaagaggccccgcggggcctcttggttcttccagcaagcgcagcggggctgcccgcgccttactccaccgtcactgacttcgccaggttacgcggcttgtccacgtcggtgccacgcgcgcaggccgtgtggtaggccagcagctgcagcggcaccacgtgcaggatcggcgagagatcgccgtagtgctcgggcaggcggatcacctggatgccgtcggacgactggatttgggtgtcgctgtcggcaaacacgtacaggcggccaccgcgggcgcgcacttcctggatgttggacttgagtttttccagcagtgcgtcgttgggggcgacggtgaccaccggcatggcttcggtgaccagtgccagcgggccgtgcttgagctcgcccgccgggtaggcctcggcatggatataggagatttccttgagcttgagcgcgccttccagggcgatcgggtaatgcagtccgcggccgaggaacaatgcgttctcgcggcgcgcgaagtcttccgaccaggcgatgatctgcggctccagcgccagcacgccatgcagcgcggcgggcaggtggcgcaggttggtcagggccttggcctcggcgtcttcggtcagcaggccgcgcaccttggccagcgccagcgtcagcatgtagagcgcggccagctgcgtggtgaaggccttggtcgaggccacgccgatctcggtgccggcgcgcgtcaggaagcgcagctcggtctcgcgcaccatggcgctggtggccacgttgcagaccgccagcgtgtgcacgtggccaagcgcgcgcgcatggcgcagcgcggccatggtgtcggcggtctcgccggactgcgagatcaccaccaccagcgcgcgcggattgggcacggtctcgcggtagcggtattcgctggcgacctcgacctgggtcgggatcctggcaatgctctccagccagtatttggcggtgcagccggagtaatagctggtgccgcaggccaggatcagcacgctgtcgatgccggcaaagacctcggcggcgccgctgccgaacagctccggcgaaatgctttcaatgccttccagcgtgtcgcccagcgcgcgcggctgctcgaagatctccttctgcatgaagtggcggtacgggcccagctccaccgacgcggcgtgcgcttcgaccacgcgcgcctcgcgctcgaccggatggtcgtcgacgtcgtggatggtcacgccgtccagcgtgagctcgaccacatcgccctcttccaggtagatgatgcggttggcggtgccggccacagccagcgcgtcggaggccaggaaggcctcgttctcgcccagcgccaccaccagcggcgaaccggcgcgcgcgccgaccacgcggccgggctggtccttggcgaacacggcgatggcgtaggcgccgtgcaggcgcttggtcaccgcgcgcaccgaggcgaacaggtcgccgcgcgtggcactgctggggtaggtgtaggcctggtggatcaggtgggcaaccacctcggtatcggtctgcgattcaaagccgtagccgaccgcgcgcagttcttcgcgcaacggctcgtagttctcgatgatgccgttgtgcaccagcgcgatggtctcgcccgacaggtgcgggtgcgcgttgacggtatcgggcttgccatgcgtggcccagcgcgtatgcgccacgccggtgaagccggacaggccggaagcctgcgtctgcgcctccaggtcggccacgcgcgacacggtgcgcgcacgctcgaccgcatcgtcgcgcacgacggcgacgccgcacgagtcatagccgcgatactccaggcggcgcagcccttcgatcaggaccggaacgatattgcgcgtggaaaccgcgccgacgatgccacacatgctgaacccccgtttgctggcgcctgcccgtagacctcaggcgccggtatgaatcctgtggcgccgcctcgccgaggcggcgcgtgccctggccgcccgcgggcggccctctgacgcttacttcttcggctgcttgaccggccgctgccaggcgtcgatggtcagctgcttggcccgcgacagcgtcagcttgtcggcgggcgcctccttggtcagcgtggtgccggcgcccagcgtggcgccgcggcgcaccgtcaccggggccaccagctgggtgtcggagccgataaagacatcgtcctcgatcacggtgcggtgcttgttcacgccgtcatagttgcaggtgatggtacccgcgccaatattgacgcgcgaccccaccgtggcatcgcccacataagccaggtggttggccttgctgtgcgcggccacctgggcattcttgacctcgacaaagttgccgatatgcacgtcctcgcccagctcggtgccggggcgcagccgcgcgtacggcccgatgcgcccggcggggccaaccctggcctcgtcgatatggcagaacgggtgcacctgggcgccggcgccgacggtgctgttgcggatcacgcaatgggcgccgatgcgcacaccgtcttccaggtgcacgcgcccttcgaatacgcagccgacgtcgatggtgacgtcgcgcccgcagctcagttcgccgcgcacgtcgatgcgggccggatccagcagcgttacgccggcttccagcagccgccgggcctggttgccctggtggatgcgctcgacctcggccagctgcagcttgctgttgacgccgagcgtctcccagatcgccgccggctgggccgagacagtctccacgccatcggccacggcgcgctcgaccgtgtcggtcaggtagtactcgccctgggcattgtcgttgcgcagcgtcgacagccacttgcgcaggtggccggtggggcacacgataatgccggtgttgatctcgcggattgccttctcggcctcgctggcgtccttctgctcgacgatgcggacgatgctgcccgcggcatcgcgcacgatgcggccgtagccggtcgggtcgggcatttccacggtcagcacgcccaagcgctgggtgccggcttcggccacaagtgcctggagcgtggcagcgctggtgagcggaacgtcaccatacagaaccaacgtgggctggctgtcgtccaacaagggaagtgcctgcatcaccgcatggcccgtgcccagctgctggggctgttcggcgaaggcgacatcgtcggcggcaacggcctcgcgcacgcgcgcggcaccgtggccgaccacgaccaccagccgcgacggcgacagcgcacgtgccgtgtccaggacatgcgcgagcatgggccgcccggctaccgggtgcagtaccttgggcaaatcggaatacatccgcttgcccatgcccgcggcgagaatgacgatattcacaaggagacccctaggtgagtgtgtccgaaaatattcttgaaaacgccagccgggtgtttggcggactgcgccgccaggcttggcgaaaacctgcagccaggcctgcgcataatcccgcaaacccttgccaggacttggctggcagtcatctgggtggcccggttgcgatgcgcgccgattttaacatggcggtttctgcgcatcagaccgtcgtttccgaatttcacaattgctgggcccggcggattttcgcgattctgggcgcggcggccttgtgcgcctgcagcgccatgaagctgggataccagcagggtgaccacctggcctactggtggatcgacaactacgtcgatgtcagcacggcccaggaaccgctcacgcgcgaggccattgcacgcttttttgcctggcatcgcaaggcgcagttgccggaaatcgccaccttgctgcagcaggccaaggccgacgtgcgccaaccggtgaccccggccacggtcgagcacttccaggatgcctcgcagcaactggcgcgcaagtcgttcgaacaggcgatgcccgacctcgccgacctgttgctgacgctgacgcctgagcagatcggccgcatggaaaagaaatttgccgagggcaatgccaagtaccgcaagaaattcctgaatccagaccctgccgagcgcgaggaagctcgctatgacaaggtgatggactacgcgaggctggtctacggcaacttctccagcgatcaggaaaaggccatccgcgccaggatgggcccggtggtgcagaatgccgaggcgcgctacgccgagcgcgtcgcccggcagcaggaatggctcaggatggtgcgctacgtgcaggccacgcagccgcccaaggcgcaggtgatagacgtgctgcgccgcttccgcgaatactggcagaacccgccagccaagcatgccgccagccacgaggccagcatcaatgcgggcatcgcgctgaccgtggccatcgccaacatgaccacgccgcagcagaaagcgcatgcgcaagaccggttccagaaatggatcgacgacacgcatgcgctgatacgcgagaaggcaaacgccccggtgcagtcggcggcgacaaactgaagccctgcccaaaacgaagcacgcccgcgcaagcgggcgtttttccatgcggcgggcgctggcgctactgcgtgccggcctgctccgccgccggtgccgcagcagccgcgggcgggcgctcgaagcgcacgaactccatccggttctcttccacgttgccggcaaacatcagcggctgctgctggaaggtggtttcgccgaacagtgacgcctcatccaccttggccaggccggtggccagcccggtgaacgggaacaggtcggtatcggccaggtgcgacggcaccacgttgcgcagcgccgagaagatattgtcgatacggcccgggttctggcgctcccagtcctgcagcatctcgctgaccttcttgcgctgcaggttttcctgcgagccgcacaggttgcacgggatgatcgggaattccatggcgcgcgcgtacgacgcgatgtccttctccgagcaatacgccagcgggcggatcacgatgtgctggccgtcgtcggtcgacagcttgggcggcatcgccttcatcttgccgccgaagaacatgttcaggaagaaggtctggacgatgtcgtcgcggtggtggcccagcgcgatcttgttggcgcccagctccttggcggtgcggtagatcacgccgcggcgcaggcgcgagcacagcgagcaggtggtcttgccctcgggcaccttctccttgacgatcgagtaggtatccgcctcgacgatcacatattccacgccgaccgacttcaggtactccggcaggatgtgttccgggaagccgggctgcttctggtccaggttcatcgcgatcagcttgaacttgatcggcgcgcgcttctgcagcgccatcaggaccgacagcatggtgtacgagtccttgccgccactcatgcagaccagcacggtgtcgccgtcctcgatcatgccgaagtcgccgatggccttgccggtttgcgattgcagcctcgtctcgaggcggtagaagttgttagagtggctcatggagcatcctgttgcgtggcgcccgccggatggaatggccggcgcggcgcgaaggggcaacattttactttaggcgcccgcacggtgctggcgccagtggaaccgcgactcaggcctgcttgatatggaagacctcgacgccgaccgaatcgcagtccgggtacacgtcgggcttctcggtcgagacacgcaccgcgcgcaccttgggatgcttcagcatggcgcgcgcgacgtcgtcgcacaaggtttcctgcaggtgcacgtggccctgcgccatgcgctcggccacggtgttgcgcatgaagtcgtagtcgaccacttcgtcgagcttgtcggcctgcggggtgctctgcgccagcggcacgaacaggtcgatattgattagcacccgctgttcgcccttcttctcgaattcgtgcacgccgatattgatctgcacttcgtagttgcgcaggaacatgcgtcggcagtcttgcaggctggggtgggaaagggcggcgagcatggtcatgagcgggctgctgagggggaaaaggaagccgcgcccggcgggcgcggcacatcaggcactacggtattcggttgctggcttccagcttactcggtcaggaacatcacgtcgcgcgccagcggcatcaggtgctggccgccgtccacatacagcgtggtgccggtcacggcgcgcgcctgcgccaggtaggccaccgcctgggcgatgtcctcgggcgtggatgactggcccagcggcgtcacccggtgcgcgcggcggaagctctgctcggactgctcgcccgacaccagcgtgatacccggggccacgcccaccacgcgcaggcgcggcgccagcgcctgggccagctgcaccgtggcggtctgcagcgcggccttggacagcgtgtaggacaggaagtccggattcaggttatccagcttctggtccagcaggttgatcaccaccccgcgcggttcggcggccttgtccttgccggcggcggcgcccagcgccttgtgcagttcccgcgccagcagcagcggcgcggcgacgttggtgcgcatatgcgtatccagcgacgcatatgagaagctggtcgccacgtcgtactggaacagcgaagcgttgttgaccaggcaagcgggcacgcccagcacggcggtgcagtcggccaccaggcggccggtggcggcctcgtcggccaggtcggcgcgcagcaccgcggcacggcggcccagcgcgcggatctgcgtggccagggcctcggcctcgtccaccgagcgatggcagtgcacggccacgtcccagccctgcgccgccagttcaagcgcgatggcgcggcccaggcggcgcgcgccgccggtcaccagcgccacgccgcgggcggtggcgcgctggctaccagtctggctatgggtctggtcagcggtctggctggcaggagtcttggatgcgggcattgctacaatcgcaggatgcagaaagccgctagtttaccccttccccccgccgacgcgcaggccgcgtccgatacccttacggcccgcattggcgaatccatcgatgcggccggcggctggatcggctttgaccgctatatggcgctggcactgtacgcgcccggcctgggctattacagcggcggttcggccaagttcgggcgcgatgcccgcgacggcagcgacttcatcaccgccccggaactgagccccttcttcgcgcgcacgctggcgcgccagttcgcgccgctgatggcacagggattgccgcgcatgctggaattcggcgccggcaccggccggctggcggcggacctgctgctggggctggagcaggaaggccagttgccggacacgtacgccatcgtcgagctgtcgggcgaactgcgtgcgcgccagcaggccacgctggcgcagcgcgcgccgcacctggcggaccgcgtcacctggctcgatacgctgccggccagctttgaaggcgtgatcgtcggcaatgaagtgctggatgcgatgccggtgcagctctacgcacgcagcggcggccgctggcatgagcgcggcgtagtgcacagcgtagcgcgcagcgacgatgccgcccccgccttccgcttcgaggaccgcccgctggccgatgccgacatgcccgaggcactgcgcgccatcccgggcgaccacgacctcgttaccgagacccatgccgaggccgagggctttatccgcgcggtcggcgccatgctggcgcgcggcgcggccttctttatcgactacggcttcccggcgggcgagtactaccacccgcagcgcgccggcggcacgctgatgtgccactaccgccatcatgcgcacccggacccgttcctgtacccgggcctgcaggacatcaccgcgcacgtgaatttcagcggcattgcgctcgccgcggtggatgcgggactgaccgtggcgggctttgcctcgcaggcgcgcttcctgatgaatgcaggcatcaccgagctgctgatggcgctggacccgtccgacgcccgcgccttcctgccgcaggccaatgcggtgcagaagctgttgtcggaagccgagatgggcgagctgttcaaggtgatcgcgctcacgcgcggcctggacgacagcgaaccgatggacggctttacccgcggcgaccgctgccataccttgtaacggcaccggagccgccatgctgcgctggaccctgaccattttcctgagcgtgatcatcctgtccgcggcgctgccatggctgcagaggatcggactgggacggctgcccggcgacgtgcgcttccgcgttttcgggcgcgaattcgtgcttccgtttgcgtcgacgatcctgatttcgctgatggcgctggcgatcggcaagctgctgtagttttcggaatcccttcgacggcagcggcaattcggcaagagtgccgaattcgcggtgtgcggctcgcaatgggaccgcacgctgagctacaaggtccgctggttcggcacggccgaccagtatgcgcagcgcttcgagaaggagtaccgctacgaggcgccataccaggcagccgggtccaccgccgcggtgctggccttcgccgacgccttcgagcgtgccggctcgttcgatacggagaaggtcggctatgtcctggtggccggccagctggccatggccggaacgggtagcgaactgggccgggacccggaggtcggcaggttgtttcttggcgcctgaaccactgctgcggcgcggtgacgccttacaaggagatccaaatgttcaagcatctgctcgtagcggtcgacggctcggacctgtccgatacggcctaccgcaaagccatcgcgctggccagctcgatacaggcccgccttaccgcgatccaggtcgttgcgcactatgacgtgatgcgcctgcagaccgccatgctccaggaaacccggcaacgcttcatgcaggaagcctaccggcaggccgaggcctacctggcgacgatcgtgcaggaggctgccgcggccggcgtgccctgcgaaatcgcctgccccaccgtcgaccacatcttccaggccatcgtcgatgaggccgaggcaaggaagtgcgacctgatcgtgatggcctcgcacgggcggcgcgggatgcaggcgctggtgatcggcagcgagacgcagaaggtgctcacgcacacgaagatcccggtgctggtctaccgctagtgtcctgttccgcaaataccttgccatgaaatcgcccagttggccgccgtgcgtcgttgctcgtcgttgccatagctacggctatggcgcctcctcgcgcctagcctgacagccaactggacaatttcactttggcaagttatctgcggaacaggacctagcgcgccggtgcgcccggtgcgctgcgctcaaccgccgatgcgcgccgccaccgccgccacgcgcgccgcttggacacggtcgcggatctggccgacgtcatcgccgcaggcacgcgcgatagcgccggcgtcgaccgccgccgccgcctccagcgccgccagcaggcgcgccgcctgcgggtaggcgctcgactcgaagcccttgcgcccgcgcaggtcggcctcgcaggcctgcagcgcctcggcgaagcgggccggcttgcgcagcgcatcgcagcgctcgagcaggcgcatcaccgccgcggcgctgaactcttgcgaacggtggatattgccgtgctcgcgcgccaccaccagcgccaggtcgcggcattcattgggcacgcgcaggcgcacgcagacgtcttcgagcagctgcgcgctgcgtgattcgtgaccgatatggcgcggcagcacgtctgcgggcgtggtgcccttacccagatcatgcaccagcgcggcaaagcgcaccgtgagcggcgcgcccatggcggcggcctgatcgatcaccatcatcacgtgcacgccggtatcgatttccggatggtaatcggcgcgctggggcacgccccacagccgctccagctcgggcagcagccgcgccagcgcgccgcattcgcgcagcacctcgaacatgcgcgacggcttcgcttccatcagcccgcgcgccagctcctgccagacgcgctcgggcaccagcgcgtcgacctcgcccgcggcgaccatctcacgcatcagccgcatggtctcggcggcgacgccgaattcatggaagcgagcggcaaagcgggccacgcgcaggatgcgcaccgggtcttcggcaaaagcgtcggagacatggcggaacaggcgcgcggccaggtcgcgctggccgccgtgcggatcgatgaccgggccggtcaggttaccgtcggcatcgaccgcgcgcgccatcgcgttgatggtgaggtcgcgccgcaccaggtcgtcttccagcgtgacatcgggctcgcaataaaaggcaaagcccttgtagcccatcgccgtcttgcgttcggtgcgggccagcgcgtattcctctttggtgcgcggatgcaggaacaccgggaagtccttgccgaccggcttgtagccggcagcttccatctgcgccggggtcgcgcccactaccacgtagtcgcggtcctggctgggcttgcccagcaattcgtcgcggatcgcgccgccgacggcatacacctgcatcgttctggcctcgtcatgtgccggcgcccggacctggcccgccggcgggtattgctcagtggttgatgattatcgcatcgggacgatcaggggccagccggtagggttcgtcgtcggccaggaagtcgcgctcctcgcgtgcgccggcaatccattgctgcattgccggcagcgccagcatgaagtcggcgtaggccttggcgtcctcggcgtcatcgggcaggtggatgccataggtggcaaagcggctcaccaccggcgcaaagaacgcgtcggccacggtgaacccgccgaacaggaacggcccgttcgcgccgtgctgctggcgcagcccttcccagatcgcggcgatgcgctccacgtcgcgctgcacggccacgttccagccgcgcccgggcagcaccgcggtcacgttcatcggcaactggctgcgcaggttgccgaagcccgaatgcatctcggcgcagacggcgcgcgccaccgcgcgctgggcgcgctcggccggccacaggttcttttccgggaaacgctcggccaggtattcgcagatcgccagcgaatcccacaccgtgacctcgccatcgaccagcgccggcaccttgcccgcgggcgagtagcgcgcgatctcggcggcgaagctgccggtgaacaggcgcacctgcacttcttcgaaatcaatgccggcctggcgcagcaacagccacggacgcagcgaccaggaggaatagttcttgttgccgatgacaagcttcatcgtgggtccttgggggaggaaacggagggagacggcgcaggcgcggcgcctgccgcctgcaggacggcgtggcggccgcgcgccggactggtcattctgccagtgctgccgcccgcgtcaaagtgaattgcgctagcaaccgatatgaaatccggtcacatagggcgcaccgggctgccggcgcgtcagcggtgcacgctggcccgcatatgcgtcatcgcggtatcgcggttgcgcccggccagcgcgtcggtcatgaccgactccaggctgaccggatgcaggttcagttcgggtgcgaccgggtgctccagcacattgtcgagctgcatcgagtcgaggttgtcgcgcgacagcatcggttcgcccggcatatgctccatgatggtggcctgcacccgtgccagcgcatcgggcagcgcgatcaccgggcgcggatgcccggaagcgcggccggcaaagcgcaccagctcttccagtgtatagacccgcgggccgcccaactcatagccgtggccgatggttgccgggttcaccatggcattcaggtaggcctgcaccacatcctgcacgaataccggctggaagcgcgcatgcgcgcacgccagcggcaccaccggggccatctgctgcatgtgggcgaacaggttcaggaaatggtcgtcggggccgaacaccaccgagggccggaagatggtccagtccagcccgctggcacgcaccacgcgctcgccgtcgcccttgctgcgcaggtacatcgacggcccattgctgtccgcgcccagcgcgctcatatgcaacagccggcgcacgccggtggacaggcatgacgccgcgatctgccgcaccatctccacatgcgcgctggcaaaggcttcgccgtaggggtcggcgcgctcgccgtgcagcacacccaccaggttgacgacgatgccatccacgcccagcgagccgatggcgtcgtccagcgcggcattgtcggccaggcccagctccaccacttccacgcgcggcagcagcagcaggtgctgcgcgtgctcgatattgcgcgtgccgaccacgatgcggtcgggggcgatgggggaatcggggttggcgccaggctcaagcggcgcgcccgaggccgaggcagccccggccaggcgcgagacgaggtggctgccgataaagccggcgccaccgataacgaggacgttgctggtctgcatgatgcctccgtgccaagaaaactgcacgccgcggcaccctgagccagcccgggcccgccggatcgtcccggcagggcccgtcctgcccgcccccgcaggggcaatttcagggcaggctggtggtagtcaccgccgacggcgcgaccatgcccaggcgcgatttcagcgactgcggacggccactcatcaatgcagcatagtacgtggcgttggaaagcacattcttcacatagccgcgcgtttcattgaacggaatggtctctgcaaagatcgcgccttccaccggccgcaccagtgtgctgcgccaggccttgggccggcccgggccggcgttgtacgcagccgaagccagcgtccacgagctgtccaggtcggtcagcaccatgttcaggtaattggtgccaagcaggatgttgatattgggatcgcccatcatcgacggcgaaaagtcgttcatgccgatcttgcgcgcgacgtacttggccgtggccggcatcacctgcatcaggccatgtgcgcccgccgacgagcgcgcattcatgatgaagcgcgattcctggcggatcaggccgtaaacccacgccatgtcaaggccgacatcgtcggtggcgcgctgcatgatgtcgcggtacggcatcaggaaacgcagcgtgaaatcatgttcgttgcgggtgcggtcggcggagttgacggtgcggtccagcagctccaggcggcgcgcatactcggccgcggccagcagctcccggtcgctcatattgcgcagttcccagttccactcgcggttgccttcgaagcgcaggttcatgttgtagaacttctgcgcccgctgaaaaccggggcgcgaacgcatggccatggcctcggcgtcgctgacggtggtgcgcgccggcagcgtgatgcggttgcccagctcttcgctggccagctgcccgtagaagttgaactggccggcgatctgctggaagttctgctgggcctcggtgtcgcggccgtcggccttgagcgcgcggccataccagtagatccaggccgggtccttggcgcgcagttcggggcgcatcagctccaccgcctggcgcacctgcttccagtcgccctggcgcagcgcggcgcgcacgcgccattcctgggtgtcgtcggagagccactggttgccgcccaggtccatctggcggcggtagtagccggccgcgtcgggcaacagcttcctggccgcgaactggccgatcacgccccaggccgcgccctgctcgtcgcgcgacagcgcgccctgggccgtgccgaggtaggcggcagcctgcgacgggtcgctgcgcgccatcttgacgatggtggcgagcgtatcgccatccgcgcgcgcgtcgggcaccagcgcggcgatcttgccggccagcgtgacatagttctgctccagcgccagccgcgcctggtaggcgacatcgctgcgctggatctgctggctttgcgccaggtagccgatcaggtcgacacagccttcgccgtagtacctggggtcgctcagcacattgcgcgcatcggcggccacgttctggcccttgagcgcgcgcgacagcagcgcatagcactcgacctgggtatcgtccttgagcgcgaactgcggatattcgacatcgaaattggcccagtcgcgcttcttgcccagcaccagcagccagtcattgcgcatgcggtcggcaatggcgtcgcccttgtagcgctgcaggaacacgcgcacctggtcgtcgggcgcatcgatgcgcgccaggccgctggcgtcgaacaattgcggcttgatgcggaagtactcgacataggacgggaccgggtagtccaccagcgtggccgagatcgcgtaggcacgctccacgtcgttcttgcgcgcggcttcgcgcagcgcggtgaaggcctcgtcgggatcgctcgggatcaccgccgcctgcgggcgcgacaccgcctgcgggcgcttctgcgcatggacgggcgtgacaagcagtgcacatgcgagcgcgatccaggcggcccggccggcacgctgcagatatactcccttcagcattctttgcttccttgtcgatgacggcggcgccggcgcctgcaatcttgtgcccagccgcggttccgccgttcgtgttggttcggacgaggggcattatcccacgccatgtcatccactcctgccacgaccgcacccacccccgccgccgaagaccgtcgcgcactgcgcacgcagttgctggcgcagcgcgccgccctgcccgcacgcgccgaagccgacgcgcgcatcgccgccgcgctgtctggattgctggccggcctggccgtgcgctgcctcggtttctactggccgatccagcaggagttcgacgcacgcgacgcggtcggcatctggctcgccgccatgcctggccgcagcgccgcgctgccgtcggtcagccgcccgggcgcgccgctggatttccacctgtggacaccggacacgcccatggccaccggccactacggcatcccggtgccggacggcactgaggccgcgacgcccgacgcgctgctcattccctgtgtcgggttcagcccggacaagttccgcctgggctacggcggcggcttctacgaccgcacgctggcggccatggcgcagcggccggtggcgatcggcattggctacgaaaactgccgggcaccgttgcaggcgcagccgcatgacatcgccatggactggatcgtcacggaatccggcgcgttctaaccttgcttggcctcgtcgcgccgcaccagctcgtccaccagcgcacgcatgcagcgccagtgcgagccctcccagaacacgcgccggcactggtcgcaggtgacaaagctgcgatggcgctccagcaccccttgcggcacgcgcccggccgcacccgccgcatccagcgagcgcagcggcgcattgcagtccaggcatagcgaaaacggccgtgcgctgcgcgccaggtccagccgcgcaaagatctcccgcacctgcagttgcgacttgatcgcgcgcacatagcagccgtgggtgatgccgcggcgcttgagcagctcgcggtcgcgcgtcagcacgacgcggccctggtcgacggcgatgcgctcgatctcgctgtcttcgaaatggttgtcgtagagggtgtcgaagccggtcatgcgcagcaggtgcgccaggccgcccaggtgcgcgtcggcgacaaagcgcatcacccgcagcggctgctcgcgtacccgcagcagcggggacacgtcgagccgttcgaacttgggatagaccgagacccggtcgccatcgcacagctgccgctcgaacccggacgattcgccattgaccaggatcagctcgacttcggtatgcggcacgccaagcgcctcgatcatgtgcttgaccgtggcggcgcgcgcgcaggcgcaggacaagtcacgccggcgctggtccggcgcgaggaagtcgttcagttcctcgtagaagcggaaggtggcggtgaccatggtgccgagtatggcaccgatcgcaggcatcgtgggagcaccacaagcgcccgcagcaggctcccctcgcccgcttgcgggagaggggagcaaacactcagcccgcattccccagccgcagcgccgcctccaccgccagcttcgcccatggcgtcatcgcgccgggcgattccagcgccgccggcggcaggctcaggtagtggcgcatggtgacctcacgctttgccgactggtagcggaagggttcgctgccctcggcctcgaacttgccgcgcgtggcgtcatccgccttcaggtagcaggtgcctcgcgacaccagcgcaaacatcagcccgtcatagaacagaccatggccgccaaacatgcgcttggccgtaatgggaccgatgcgcgccgccagcggccccatcagctcgagcagatgttcgatgaagggatcggggcggcgcgtggccatggcgggctttacagcttcaggcgctgccagatcgccttggtggcgccggcggcattgagcgtgtagaagtgcaggcccggcacgcccgctgcgagcaggcgctcgcacagcgcggtgaccacgtccaggccgaaggcgcggatcgattcgcggtcgtcgccaaagctctccagccgcttggccacccagcgcggcacttcggcgccgcacgactcggagaagcgcatcagctgcgtgtagttggtgatcggcatgatgcccggcacgatcggcacctcgaggcccgtcgcgcgcacgtcatcgacaaagcggaagtaggcgtcagcgttgtagaaatactgcgtgatcgccgagttggcgccggccttgaccttgcgcacgaagttctcgagatcgtggcgcggagacttggcctgcgggtggtactccgggtaggccgcgacttcgatgttgaaccagtcgccggtctcggcacggataaactcgaccagttcgttggcgtagcggaactcgccgatctcgcccatgcccgagggcatgtcgccgcgcagcgcgacgatatggcggatgccgccgtcgcggtactgctgcaggatagcgcggatgctctcgcgcgacgagcccacgcacgacaggtgcggcgcggcctcgatgccttcgcgctggatttccagcaccgcgtccagcgtgccctgctgcgtggtgccgccggcgccgaacgtcaccgagatgtacttgggcttgagcggggccagctgcgcacgcgtgttgcgcagtttctccgtgccctccgccgtcttgggcgggaagaattcaaagctgaagtagcggtcttgcatgatggtggcgcaccgcgttggcgcggcgcgcggtatgggattcgtgtcagtgcaggccgcgtcaggcggtgcgttcgcccagcagcaggctggccagcagccacgagatcacgctgtacaggatggagcccagcagggccgcccagaaaccgccgacggtaaagcccgacagcaggttgccgacaaacaggaacagcagcgcgttgatgacgaagataaacagccccagcgtcagcagcgtgaccggcagcgtcaggatcaccaggatcggacggatcagcgtattgaccaggcccagcaccagcgccgccagcatcgccgagccaaagctctggatgtggatcgacgagatgatgtatggcagcacgaacagcgcaacagcgttgatgatccagacgaccagtaatctcatgacggctccttgaatgtggtttctccccctctcccgcaagcgggagggggagccctgccttcctgtgcggatcagtagcggtagtggtcggccttgtacgggccttccttcttcacgccgatgtacgcggcctgctgttcggtcagctcggtcagctgcgcgttcagcttgcgcagctgcaggcgcgccaccttctcgtccaggtgcttgggcagcgtgtagacgccgaccgggtacttgccgctgtcgcgttcctgccagagttcgatctgggcgatggtctggttggcgaacgagctgctcatcacgtacgacgggtggccggtggcgcagcccaggttcaccaggcggcccttggccaggatgatcagcttcttgccgtccgggaacttgacgtgatcgacctgcggcttgatctcatcccattcgtacttctcgatcgaggcgatgtcgatctcgttgtcgaagtggccgatattgcagacgatggcctggtccttcatcttcgccatgtggtcatgggtgatgacatggtagttgccggtgcaggtgacgaagatatcgccatgctcggcggcgtagtccatggtcaccacgcggtagccttccatcgcggcctgcagcgcgcagatcgggtcgatctcggtcacccacacctgggccgacagcgcgcgcagcgcctgtgcgctgcccttgcccacgtcgccgtagccggccacgatggcaaccttgccggcgatcatcacgtcggtggcgcgcttgatgccgtccaccagcgactcgcggcagccgtacaggttgtcgaacttgctcttggtcaccgagtcgttgacgttgatggccgggaagcgcagttcgcccttctgggccatctggtacaggcggtgcacgccggtggtggtttcctcggtcacgccgcggatggctgccaggttgcggctgtaccagctcgggtccttggccagcttttccttgatcgcggcgaacaggtaggtttcttcctcgctggtggccttggcgatcacggactggtccttctcggcgcgcgcgcccaggtgcagcagcagcgtggcgtcgccgccgtcatccaggatcatgttgggggtgccgccgtccgcccagtcgaagatgcggtgggtgaagtcccagtattccttcagcgattcgcccttgaacgcgaacacgggcgtgccgcctgcggcgatcgcggcagcggcgtggtcctgcgtcgagaagatgttgcacgaggcccagcgcacgtcggcgcccagtgccttgagcgtctcgatcagcacggcggtctggatcgtcatgtgcagcgagccggcaatgcgcgcgcccttgagcggctgcgccgctgcgaattcgtcgcggatcgccatcaggccgggcatctcggtctcggcaatggcgatttccttgcggccccagccggccaggttgatgtcggcgacgaggtagtcttgcttcaggtcggtcacagcgttcatgtttcactcccggtgaagagtggcacgcaggtgacgagtacggggaatctggcagccgtggcatggcgcaagggcacatgcgaagcacgcggataggtcgactcgcctccgtgcggaccacggatcagcgagcgccgttgaagacagtccgagcctggcggatggcatggggcggctgtgccgccggccgcgcgatgtgcttcgcaggcctccatccgttgcaacgctcctcggagtggcggtattgtagcgtgcccgggcgccttgcgcaccggctccctccgattcctgcacagatgatcccaacgccaccccgtaccctgaccatcgccggttccgactccggcggcggcgccggcatccaggccgacctgaagaccttttccgcgctgggttgcttcggcatgagcgccatcaccgcgatcaccgcgcagaacacgctgggcgtgaccggcgtgcacgccattcccgccgacatggtggccgcgcagatcgatgccgtggccagcgatatcggcatggacgcggccaagaccggcatgctgggcaccgccgccatcgtcgaggccgtggccgcggcggctgaccggcacggcatcagcaagctggtggtggacccggtgatgatctcgacctcgggcgcgacgctgtccgatgacgccaccacgcaggcgatggtgcggctgctgttcccgcgcgcgctgctggtcacgcccaacctgcccgaggcttcctacctgctgggccgcaggatcacgcgccgtgcggagatggaacaggccgccgccgacctgatcgcgatgggctgccccgcggtgctgctcaagggcggccacctggaagacggtgccgccgccggcggcctggatgacctgctgatgctggccgacggcagcgtgcgcgtgttcacgcatccgcgtgtcgatacccgcaacctgcacggcaccggctgcacgctggccgccgcgattgccgcgcagcttgcgcgcggcgatgcgctggagccggcggtgggcacggcgctggactacgtggcgcaggccatcgcggcgggcgcggggctgcggctgggtgccggcaacggcccgctgaaccatttgttcgcgccgcgcgcgctgggttgacggacatgccgatgctggccgatatcgacctgcgcagcgacccggctgccgcgttctacctcaagcatgaagttgtcgacgtggtgttcgccaccgaacccggcgagctgatcagccgcgagggacccaaccgctaccaacctggcgatgcgctgatcaccagccgcggcggcgaccgctggtgcgtctcgcgcgaccgcttcgaccccaaatacgaggccgtgccgccgctggcgcacggccaggacggcgcctaccgcaacaagccgatcccggtactggcgcgcgaaatgcacgaggccttcagcatcgcgcgcagcgccggcggcgacgtgctgcacggcaagccgggcgactggctgatgcaatacgcgcccggcgactatggcatcaccgagcgcgcgcgtttcgaacaggtgtaccggccgctgcaggactgagcgaccagaccgatgccggggtcagttgccgccggcggacagcggcaccagcttgaacgcggcccgcgccacgcacaccacggtgccggcagcatccttgacctcgccctcgcagaatgcaatgcgcgcgccgcggcgcaggcagcgcgcctccagcgtcagctcgccgcgcgctgccgccaggaaatgcgtggacatgtcgatcgtgatcacgccggtttccagcggcgcatgcgagcgcgcggcgccgctcagggtgaagtccagcgtcgccatcagcgtgccgccatgcacatcgccgcggctgttgaccagcgacgggtgcgccggcagccgcgtgcggcaatagccctcctcgataagctccggctgcaggccgaaatagcgcatcagcggcacgtcgatgccgaagtagggcttctcgggcgtgccgggggcgacgggggtgatttcgggggcggtctggctggacatgatgggggatgctgggtggttggcggggaatgctgcccaacatcataacggcggggtcccgttcggttcccgcggctgggcgaatgtcgcacaaatcctggcaccgcgcgcgcccttcagagcacctgccgcatcgccacccgctgccgcagccccgcagcacgctgcgccgccaatgcatcggccagcagcggacacagctcgtcgtcacgcaactggcgaaacccgagcgatgcatagaacggcgcattccagggcaggtgggcaaacgtggtcaggttgagcgagtgcgatccccccgcccgcgcccagccctgcaccgcccctaccagcgcccgcccaatgccgcggcgcccgtggtcggggtgcacatccatttcatcgaggtaggcgcactcgccgttgcggctggccagcgcaaagccggccagttccccatcgcgctcggctacccacaggcgcgcttcgcgctgcgcggcggccagcaccggctcgggcgtgctgaccaggcgcagcagtgccggcaggtccgtatcagggaagagcgccgcggcggccagttcgatatcggccaggcgcggcacctcgtccgccgctgccaggcggatgtgcgcagcagcagccatggctggctccgcgctcaggcagccgggaacaggctgatcagttgggccaccgcggccggcacgtcgtcagcctcggtcaccgcgcgcaccacggcggcactgccgacgcccaccgccagcacctcgcgcatattggccgcgttgacgccgccgatgcccaccagcgacgggatcaccggctgcatcagcttcacgtaggcgcggaagcggcccatgccctgcggctgggtcggcatcaccttggtggtggtcgggaagatcgcgcccagcgccaggtagctggggcggatcgcggccacgcgcagcatctcggcatagccatgggtggagacacccaggcgcaggcccgaagcgcggatcgcatcgaggtcggcatcgtccaggtcttcctggccaaggtggatgccgtagatgccgctctgatcgccgccgttggcggcgcggtagtcgatcgcggcctgccagtggtcgttgacgaacaggcgcgaagacgagccctgcgtggccttcgccgcgcgtgcgatctcggcgcgcaccgcggccgggtcttcggacttgaagcgcagctgcaccgtcggtacgttcagtggcgccaggcgctcgatccattcggcgcttggcaccaccacgtacaggcccagcgcggggcacggcgcgaacggcgccgcggcctgctcgggtgccaccagggcggcgtgccgtacatgcgggaagcgggcaaagtcagacggccagtcggccgagcccggctcccaggcgcgcgccaggcacagcgcgtcgtgcgcggggaaatgcagcgccaggctggccagcagcaccgcgacgaaggcgggcgaatgcggctggtcggtgtcggcggcgacggagaagacccacgtgcccatcggcgagcgcacggtgtcgatccactggccgccctcgcgatcgctctcgatcagcgtggcgcccgcggcggcgacgcgcgcgatcgtgcctgcgtcggcttcgccgtcgaacagcagcacgtcgtgggcgccgggttgcgcgggcgcgtcggccaggcgccaggcctgccacggcttgtcatcgacgccgaaggtctcgccatagtgttccagcaccgcctggcgcagcgggccgtcgctggcggcatgcacggcgcggcgggtcatgcgcgctgctccgtgctgtcggcgtgccagaacggcatgccgaccaccggggtgctggcctgcgccacctcgcgctcgggcatcggcccggccaggtaggcggtgcggccggcctcaacggcctgcgcaaaggcgcgcgccatattgaccgggtaggcggcctgcgccaccgcggtattgagcagcacgccgtcgtagccccactccagcacctgcgccgcatgcgacggcaggcccaggccggcatcgacgatcagcggcgtgtcgggcaggcgctcgcgcagcacgcgcatcgcgtgcgggttgaccgcgccgcggccggtgccgatcggcgcggcccatggcatcagcgcctggcagcccacgtcgagcaggcggcggcacagcaccaggtcctcggtgcagtacggcagcaccttgaagccttccttgatcagggtctcggccacggccggcaggttcagcgtatcgggttgcagcgtgtagtcgtcgccgatcagctccagcttgatccacggtgtttcgaagacctcgcgcgccatcatcgcagtggtgatcacttcctgcgcggtgaagcagccggcggtattgggcagcaccggcacgtccagcgccttgagcatctgccagaaggcctggccgccctcgccggcgccgaccgcgccctggcggcgcagcgcaacggtgatcatggcgggcctggaggcctgcacggccgcctccagcgtggccggcgacgggtagcgcgcggtgcccagcagcaggcgcgagccgaacgactcgccatacagcacgaacgggtcgcgcaaggtttcggaaggttcgaatgtcatgggtcagcctcccgtcacgggttgcacgaggtcgatgcggtcgccggccgcaagaatggtgttggcgtgggcgccgcgcggcacgaactggccgttgaccgccgcggcaaaggggggcgcgatctgcgccgcgctcaccgcgtccgccagcgtggcggaatcggcaagggcgagcggtcggccgttgagcaggatttccatgtcagtcatgcgttagtgcagcagcccgccgggtgcggccatggtagcggcagcgggcgcttcggtcacggcttcgatcatgccaggccagcgcagcgcggccggcacggcatgggccgcgggatcgcccttgagcagcgcgccaaccaccgcgcacgcggcctcggtcaccgccggcgcaatcagaaagccatgccggtacaagccgttgacgcgcaccacgcgcgcgcgctggtccacgcggatcgccggcaggtggtcgggccgcgtcgggcgccgctgcacgttcagttccagcacgcgggcctcgccgaaggcgggatgcagtgaatgcgccgccgacagcagctccagcgcggaacgcacgctcatgggcgaatcatcctcgctttccagctcggtggcaccgatcacgtacaggtcgttgggcttgggcgcgatatagatcgggtagcgcggatgcagcagccgcaccggccgatgcagcctgacgtcgggcgcatgcacgcgcaccacttcgccgcgcaggccgcgcaggcccggcttgtcgccgcccggctgtgcgggccaggccgagcgcgcgcccaggccgcggcaatccagcaccacgtcggcacggatgccgagcttgggcagcgattcggcatcgacctcgccagcctcccagacgcaatgcacgccttcgctgaccgcgcacgacaacagcgcgcgcagcgcgccacggttgtcgagctggccttcgccggccagcagcaggccctgcgggaagcggcccgccagcgcgggctcgacttcgcccacgcccttgccgtccagcgcgcgcagccgctgcgacaccagttcgggcggcgccaccgcgcgcacgcggctggtgaacagcgacatctcggcacggtcgcgcgcatgccagaccaccagcgtgccgtcctcctggaagaagaccggctcaggcaattcggccagccacgcgcgccacaggtcgacactggcgatgcccaggtcgacgatgcggcgctcggcgatggccgattccgccagcggcgccagcatggccgcagccacataggcggccgagcccgcgccgtccggaccggcccgctccaccagcgccacgcgggcgccgctgcgtaccagttgccaggcggccaggcgcccggcaagaccggccccgagaatggcgacgtcaaacgactgcactgctgtcatgaggggtgttgtgccggacggcgcgtgcggccgcgccggcctccttgttgtcggtgccgccgcgcgaggcgctgcgcggcggcgaaacacgagcgggcatggatgcgaagccatgcccgtactgccagtcactgcatcacgagtagatcttgctgcccttcttcaggaactcgatcgacttctcttccatgccctgctgcgcttccttgggcagcgacgccgcgtagtcgcgcacttcctgcgtgatcttcatcgagcagaacttcggcccgcacatcgagcagaagtgggcgatcttggcgccctcggccggcagcgtggcgtcgtggtacgaacgcgcgcgttccgggtcgaggcccaggttgaactggtcttcccagcggaactcgaagcgtgccttggacagcgcgttgtcgcgcagctgcgcgccgggccagcccttggcaaggtcggcagcgtgggccgcgatcttgtaggtgatgatgccttcgcgcacgtcttccttgtccggcaggccaaggtgctccttgggcgtgacgtaacacagcatggcggtgcccatccagccgatattggccgcgccgatgccgctggtgatgtggtcgtagccgggggcgatgtccgtcaccagcggtccaagggtgtagaacggcgcctcgtagcaatgcttgagctcttcgtccatattggcctggatgcgctgcagcggcacgtggcccgggccttcgatcatcacctgcacgtcgtgcttccatgccttggcggtcagttcgcccagcgtgcgcagttcgccgaactgggcgtcgtcgttcgagtcggcgatgcaacccggacgcaggccgtcgccgaggctgaacgacacgtcataggccttcatgatttcgcagatctcgtcgaagtgcgtgtacaggaagttttccttgtggtgtgccaggcaccacttggccatgatcgaaccaccgcgcgaaacgatgcccgtgacgcggtcggcggtcagcggcacatagcgcagcagcacgcctgcgtgaatggtgaagtagtccacgccctgctcggcctgctcgatcagcgtgtcgcggaacatctcccaggtcaggtcctcggcgatgccgccggtcttgtccagcgcctggtagatcggcaccgtgccgatcgggaccggcgagttgcgcaggatccattcgcgggtttcgtggatgtgcttgccggtggacaggtccatgatggtgtcggcgccccagcggatcgaccacaccatcttttccacttcctcggccagcgacgaggtcaccgccgagttgcccaggttgccgttgatcttgacgcggaaattgcgcccgatcgccatcggctccagttcggtgtggttgatgttggcgggaatgatggcgcggcccgaggcgatttcctggcgcacgaattccggcgtgatgtcttccggacgcagcggcaggccggcgcccagcgcattgccgggatgctggcgcagcagcgccttgtagtcgggcttgtcgtacagcgcctgcaggttcagcgattcgcgcagcgccacatactccatttcaggcgtgatgatgcccttgcgcgcatagtgcatctgcgacacgttggcaccggccttggcacggcgcggattggtcagctgggcaaagcgcaggtgtgcggtggcggggtcgttggcacggtcgcgtccgtattccgacgacaggcccggcagcacttcggtgtcgccacgctcttcgatccacttggcgcgcacggcgggcaggccggccttcaggtcgatatgcacgtccggatcgctgtacgggcccgaggtgtcgtacaccgggatcggcggattctgcatctcgcccttgtcggtgcgcgtcgacgtttgcaggatggtgcgcagcggtacgcggatatcggggcggctgcccgtcaggtaggtcttgctggaagccgggtaggcgaatttctggtcgaggtcgctttcgagcgattcgaaggatgcagcgggggcagtacgggccatgggtgtcgtcctctctcttgcggggtggacgaaaccaggagccttgtgagcgctgcccggggcctgaggcctgaggcggcgagtcccggagggactggagacttggtcttgtgaaacttcccacgccggtactagccggatcgggttcgaagggactctctcagccgcacggcccatccgtacggcacccctgtttcatccaacggggtgaatttaagcacaaggtgccggtgggcgccagtgccagttccctgccgtttgtggtgccacacctgttcgaaaaggtatcgaatcgcgcatgctgcagcgcaataatcactcacaaggggacaaccgcgcactcaaacgccggcgacgtgctctaccatgcagtaagacgcgtccatcttccgatcccgccatgaccgaagctgccacccaccgcgtgttcaaccaggtgcccgatctcgcgcactacaacctgttcgccaccgatccggcgctgcgcggcgcgctggaacggctgggaggcggctggcacgccggcacgctgggccagttcggcgcgcgcctgggcgagccggaagtccagcaatgggcagccgatgccaaccgccacacgcccgagctgcacacacacagccgcaccggcgagcgcatcgacgccgtggatttccacccgagctggcacgcgctgctggccctgttgcgcagccagcagctgcaggccctgcccttcgcgcagccgcgcgcgggcgcatgggtggcgcgcaccgccggctacttcctgcaggcgcaggtggaatccggctcgctgtgcccgccgaccatgaccttcgccagcatcccggtgctgcgcaaggaaaccgcattgtttgccgagcttgagccgcggttgtatgcgaccgaacacgatgcgcgcgacctgccgtggcgcagcaagagcgcgatcatgatcggcatgggcatgaccgagaaacagggcggctcggacgtgcgcgccaacaccaccgtggcgcgcgcggtgcgcggcgagggccgcggcgcggaatacgcgctgaccgggcacaagtggttcttctccgcgccgatgtgcgatgcgcacctggtggtcgcgcgcatgggcgccgaagacggcccgctgtcgtgcttcttcgtgccgcgcttccgcgacgacggcagcaagaacgcggtgctgatccagcggctcaaggacaagctaggcaaccgctccaattccagcagcgaggtggagttccgcgacgccaccggcatcctgatcggcgaggaaggccgcggcatcccgaccatcatcgagatggccaccagcacgcggctggactgcgtgatcggcagtgccgcgatcctgcgcgccgcctttgtgcaggcgctgcaccatgcgcgccaccgcagcgccttcgggcgcctgctggccgaccagccgctgatgcgcaatgtgctggccgacctggcgctggaatccgaagcggccacgctgctgatgatggaactgggccacgccttcgagcacgctgacgatgatccgctcgcggcgtcgtggaagcgcgtggtcacccccgcggccaaattctgggtctgcaagcgcacgctggaagccaccggcgaagccatggaagtctggggcggcaacggctacgtggaagaaggcccgatggcgcggctgtaccgcgaggcgccggtcaactcgatctgggaaggctcgggcaacatcatgtgcctggacgtgctgcgcgcgatccagcgcaatcccgacgatgccgcgcgcttgctgcaagacctgtcgcgccgcgccggcggccatccggcggtgcgcgcggaactggcatcgctgcaggcgctgctgcgccagccgccggaattgctggaagccagcgcccgacgctttgcgcaggggttggtgctgaccgcacaggccgcgctgatgctggcgcatgccgataccgagaatgccgagctgttcgtcgccagccggctgggacggcagcacgggcgcgtgttcggcaccctggatgcggatgccgacgtgctcaagcgggtgttctcgcgcggcttcgaaggctagcgattcaagcctccatcgattccagcacccgcagcatcacgcgcggcgcatagcggatcaggtcatgcgcgcgctcgccgatcatgatcgcgggcgcattgatgttgccgccgaccagggtcggcatcaccgatgcatcgaccacgcgcaaaccctcgacgccgcgcacgcgcagttgcgggtccaccaccgccatcgcatccatgcccatgcggcaggtgcccaccgggtggtagatggtgtcggcatgctcgcggatcatctcgcgcacggcagcgtcgtcgctgccatcggcacgcaggccggcggaatagagttcgcgcccgccgaagccggccagttgcggctgcgcaaagatgctgcgcacgatgcgaacgccggcgaccatgtcgtccaggtcgcgcgcatcgctcaggtattgcgggtcgatcagcggcgcgcgccggatatcgtgcgaggccagccgcacctcgccgcggctgcgcgggcgcagcacgcagacatggcaggaatagccatggccgaagttcagccggcgcatgtggtcatcggccatgccgaccacgaaatgcagctgcaggtcgggctcgggcaggtccgggcggctgcgcaggaagccgcctgcctcggcgaagttgcttgacatcatgccggtgcgttcgcgccggtagcgcagcatttcaggcaccagccgcgccaggccgccgaacgacacgccgaacaattcaggcacggccacgcgcttgtgcagcacgatgtccaggtggtcctgcaggttggcgcccacgccgggcaggtcatgcacgacggcgatgccatgttcgcgcaagtgcgcggcggggccgacgcccgacaccatcagcagctgcggcgagccgaacgtgcccgcgcacacgatcacgtcgcggcgcgcgcgcagcagttgccggtggccctcgcgcaccacctgcaccccggccgcatggcggccttcgaagactatgcgcagcgcctgcgtatcggtcagcacccgcaggtgcgcgcggccgccattgcaggcccggtcgcgcttgttgccaccgtgcaggtaggcacgcgccgcgttccagcgctcgcccgcgtgctgcgtgacctggtaccagcccacgccctcctgttcttcgccgttgaaatcgtcgttgcgcgggaagcccgcctgctgcgcggcctcgatgaagcgttcggcaaaggggttgggggtgcgcaggtcgctcacgtgcaacggcccgttgccgccgtgcagcgggtcgtcgtcgctgccggccaggcgttcattgcactcggcgcggcggaagtacggcagcacgtcgtcccacgaccagccgtcgcagccggcggcggcccacgcgtcataatcggcggcgcggccgcgcgtgtagatcatggcgttgatcgaggaactgccgcccagcccgcgcccgcgcggctggtagccgcggcggccgttcaggcctggctgcggcacggtttcatagccgtagttgcgtgcccccgcgcgcggcagcagcgcggcaagcgccgcgggtgtgcgtaccagcacatggtgatcgtggtgcccggcctcgaccagggcaatggtgtcgtcgccgctgtcggcaagccgccccgccagcgcacagcccgccgagcccgcgccgacgatgacgtagtcaaaggtggtttccatctgtctccccgcgagtccgcaggcggcgcgcgtgcgtgagccgggccgcgccggtgcatgcgcgccctgtccgtccagcggatggcaagctgtgagattcagtgtaggcgctagcccggacggtggagaagcccggtggcgcgggccgccggcgctgcgcagacgggcgtttgaattgcccttctggtaggaaacttccattgccatggctggcacgctaccttatcgtgcgcgggaacacgcggaccgctgcagcgccactcgccgcgatccacatccactttccccgcacgtcccttgcccaggagcgcagcaatgcgagaagtccccgacctgtcgtccgtctttggcgccatgcacgccgcgtcgcggcgcgaccagctgcccgcctgggccgtgcgtgccgaccgcctgcagcgcctgcgccggctggtgacagagaacgaggctgccattgccgccgccattcacgcggacttcaccaaccggccgcggcaggaaaccgcgctgctggaggtattcccgagcctcggcggcatcgacgacgcgctgcgccacggcaagcgctggatgcgcgtgcgccgcgccgccaccggcttctggttccgcccgggccgctcgcggctggtgccgcagccgctgggagtggtgggcatcgtggtgccctggaactatccgctgtacctgacggtagggccgctggccggcgcgctggcggcgggcaaccgcgccatggtgaagctgtcggaatacacgccgcgctttgcggccttgttcgcgcaactggtgccgcagcactttgcgccggacgagatcatggtggtcaatggcgatgccgaggtggcgagcgcctttaccgcgctgcccttcgaccacctgctgttcaccggctcgaccgcggtcggccaccatgtgatgcgcgcggcagccgccaacctgaccccggtgacgctggaactcggcggcaaatcgccggcgattatcggcgccggcgctgacctgccgcgtgcggtggaacgcatcctggtgggcaagctgatgaacgcgggccagacctgcatcgcgccagactacgtgctggtgccggaagacctgcgcgggcagctggtggagccggcacgccggtgcgttgaccggctctatccggacctggcgcgcaaccgggactacaccagcatcatcagcccgcgccacttcgcgcggctggcggcgctggtggacgaagccgcggcgcaaggcgcgaccgtggtgccgctgtccgatgcgcagccggacgcgcacgcgcggcgcctgccaccggtgctgctgctggatgtgcccgaaggcgtcacggcgatgcgcgaggagatcttcgggccggtactgcccgtggtgacgtaccgcaccctggacgaggcggtggactacatcaatgcgcgcccgcggccgctggcgctatacctgttcgagcgcgaccgcggcgccatcggccatgtgatgaagcagaccgttgccggcggcgtcacggtcaacgacaccctgttccatatcgcccaggacggcctgcccttcggcggggtcggcgccagcggcatgggcgcctatcacggccaggcgggcttcgacaccttctccaaggtgaagccggtgttccaccaggccggcctgaacggcgcaggactgctcaagccgccttacggcaagaccttcgaaaccatgttgcgcctgcttctgcgttgatcaggacaccagcatcggccgcccgagcatgcgcgacagcaccgcctcgggcgagtgggtgtggtcggaaatcgcctgcggcgccaggtagatggtctgctccatcatcgcccgtccgcgcatggccgcgtgcagcagctggtcgctgaagacgatccaggtggaacccggcgggaagtggaattcctgctgcggcaccttggcctggtaatccaggtcggccttggccaagtcatgcagctgcagcatgcggtggtcatattccgagcgcttgcgcttggtgatatgcagcagcttcatcagcgccgcctgccccggccacatgccatgggtcttgggcacgaacttctgcgcaaaatcgccgaacggctcgcccacgcgccacacgcgcgccgcggccgggtcgatgttgtggaacacgcgcaacaggcgcttgcccagcatcgggttggacgggaacgagtccacgtgcaggcgggtgtcgtccttgcgccagctgaccgggcgcccggcgatctcgctgggccgcagcgaggtgccggcgcgcgtcatgtgcgggatgtattcagggaacagcgtgcgcaccagcaattcgctgttgtcggcgtagcggcggatcagcgtgtacaggtccgccaggtcctgcggactgccctgggcgccgcgcaccgcggtgtcgtcggcgcgcaggttgatgttcttggacttgccgtcggaatagcggctgtcaaggaagcgctcttcgcccggctggaagcggaaattcaggttcgggaagtacagcacggcgccctgctccagctcgcggcgcagcgtggcgcgttcttcggccgtgacctgcggcgcccagtcggcatatggctgcgggcggatcaggttgagctggccggcggcgggcggctgggttgaggtcgagggggcaaggacaggcgcttcggacatggcatcctctggaaacggtcaccagtgtttggggtcggccgccggcgtggcggctggggatggcgggattttactccctgccgtcagccgtggcgccggcgtcacgcggcgactggaccaggatcaagcccgcgtaaaaaaaccccgcgggcccttgcgggccggcggggcttgccgtcagtgctgctggcgcgggtggcgcttacaggccggccgcggcgcgcagggcagccgccttgtcggtggcttcccaagagaattccggctcttcgcggccgaagtggccgtaggcggcagtcttctcgtagatcgggcgcagcaggtccagcatctgcacgatgcccttcgggcgcaggtcgaagtgctcctgcaccagctcggcgatcttggcgtcggggatcttgccggtgccttcggtgtagaccgtcacgttgatcgggcgggccacgccgatggcgtagctgacctgcacctggcactggcgcgccaggcccgaagccaccacgttcttggcaacgtagcgcgcggcgtaggcggccgagcggtcgaccttggacgggtccttgcccgagaacgcgccgccaccgtgcggcgaggcgccgccgtaggtatcgacgatgatcttgcgcccggtcaggccgcagtcgccctgcgggccgccgatgacgaagcgcccggtcgggttcaccaggtacttggtttccttcagcatctcggccggcagcaccggcttgatgatttcctcgatcacggcttcgcggatctgggcctgggtgatgtccggcgaatgctgggtcgacagcaccacggtatccacgctgtgcggcttgccgtcgacataacgcaccgtcacctgcgacttggcgtccgggcgcagccagggcaggcggccgtcgcggcgcagcagcgactggcgctcgaccaggcggtgggcgtagtagatcgggaacggcatcagttccggggtctcgtcgcaggcgtagccgaacatcaggccctggtcgccggcaccctggttcaggtagtcgtcggaggcgcggtccacgccttgggcgatgtcgggcgattgcttgtcataggcgaccagcaccgcgcagcccttgtagtcgatgccgtaatcggtgttgtcgtagccgatgcgcttgatcgtgtcgcgcgcgatctggatatagtcgacgttggcagtcgtggtgatttccccagccagcaccaccagaccggtgttgcaaagcgtctcggccgccacacgcgcgtacttgtcctgggccaggatggcgtcgaggacggcgtcggaaatctggtcggcgaccttatcgggatggccttcggagacggattccgaagtaaaaaggaagtcgtttgccacgaacttattctccaggttggctattgcgtgccagcccgatcagttcatggcggcgacactttagcggtatttcaagcagcccggttagagccgcatcgccccgcaagttgtcagttaactcggcgatacacgctattatacgcgcctgccgggctcgttgcagcgcgccaacggtacggtacggcaccctgccaaccagccgggggcaccgtgcccagatgaatccgatgacggcacgctgcgcgcggaactgaataccgccatagaaaaaacgctgcctgcccgtctgttccccggcacagacccgtagcagacccgcttttcgcgcctgatgacctttttgttctggctgatctcccgttttcccctgcggctgctgcaagccgcgggcggcgcgctcggactgctgagcgcgcgcctgcccggccgctacggccagcgcctgcgggagaacttccgccaggcgtttcccgacgccaccgatgcgatgatcgacgaagcggcccgttcggccggacgcatgatcgtcgagatgccctacttctggagccgcagcaagatcggtgcgaagctgcatggctttgacgactacctgtggcccgagctgggcaagctgcaggcgcgcggcaagggcatcatcatcctgaccccgcacctgggctgctttgaagtgctgccgcagtcccacgcgctgcagcgcccggtcaccgccctgttcaagccgccgcaccagccctggctgcgcgactggattgaaaaaatgcgcacccggcccggcatgcacatggcgccggccacgccgcgcggtgtgcgcatgctggtgaaggcactcaagcgcggccaggcggtgggcatcctgcccgaccaggtgcccagcggcggcgagggcaactgggcgccgttcttcggcaagccggcctataccatggcactggtgcaccggctgcagcagctgaccggcgcgccggtggtggcggtctttgccgagcgcctgccgcgcggcgccggctatcgcggccacctgcgcgtgatcaacgacggcggcatgctgccggacgatcctgccgccgctgccgcggtcatcaaccggactatcgaggaactggtgggcctgtgccccacgcagtacctgtgggcttacaaccgctacaagcaacccgccggagcgggtaccccggacgcgccgggcaatgataccgagccggccactgatcgatcgatttcatgagccgtgtgttcacgtggcttggcatcggcttgctgacggtgctgggcaagctgccatatccgttcgtcgcgcgcttcggcgaggcgctgggaagcctgctctacctggtgccgagcgagcggcgccgcgtggtgcaggccaacctgcgcctgtgtttcccggaccggaccgaggccgaaatcgatgaactgtcgcggcagagcttccgcatcctgttccgcagctttgccgaacgcggcatcttctggaccggcagtgaggcgcagatgcgccgctgggtgcagatcgacgaccaggccggcctggtggccctggatggcaccccgcatatcctggtgacgctgcacctgtcgggcgtggaagccggtgcgatccgactcaccatcgacctgcgcgagcatctcggccgctccggcgcatcgctctataccaggcagaagaacgacctgttcgaccacttcctgaagcacgcgcgcgggcgcttcggcgccaacatgatctcgcgcaacgacagcgcgcgcgacatcctgcgctgcctgaagaagggcgaggccctgcagctgatcgccgacatggatttcggcgagcgcgactcggagttcgtgccgttcttcggcgtgcaggcgctgacactgacctcggtgtcgcggctggcgcgcctgaccggggccaaggtcgtgccgatctacaccgagatgctgcccgactaccagggctatgtgctgcgcatcctgccgccctgggaagactaccccggcgcaagcgtcaccgacgacacgcgccgcatgaatgccttcttcgaggactgcatccgcccgcgcgtacccgagtactactgggtgcacaagcgcttcaagcaccgcctgccgggcgagcccgagatctactgagcgcgccggcacgtccggcgccgcgcagctacaatccccaccatgaaactccagttcaccaagatgcacggcgcgggcaacgactttgtcgtgctcgacggcatccaccagcagatcgacctgaccccggcgcaatggcgtgcgctggccagccggcatttcggcgttggcgctgaccagatcctgatcgttgaaaagccgtcccgccccgatgtcgacttccgctaccggatcgtcaatgccgatggcagcgaggtggagcactgcggcaacggcgcgcgctgctttgtgcgttttgtcaccgacaagggcatgaccgacaagcgctcggtgcgcgtcgaagtgatgaacggcgtcattaccctgacgctgcaggacgacggccaggtcacggtggacatgggtgcgcccgaactggaaccggcgcgcgtgccgttccgtgcggaaggcctgcccacccgcgcggaaggcgcggacacgctgtacggcctggaggtcaacggccgcaccgaatggatctcggtggtatcgatgggcaatccgcacgcggtgcaggtggtggacgacgtggagaacttcccggtgctgcaggacggcccggtggtggagcaccatgccgccttccccaaccgcgtcaatgccggcttcatgcaggtgcaggaccgccatgccatccggctgcgcgtctacgaacgcggtgccggcgaaaccctggcctgcggcaccggcgcctgcgcggccgtggtggccggcatccggcgcggcctgctggactcgccggtgcgggtgcatacccacggcggcgatctgaccattgcctgggatggcggcgcggaaccggtgcgcatgaccggcccggccaccaccgtgtttgaaggcagcattgacctggcagccctgccggcctgaccataggggctgtgcgcccctgtccacacgccccgcattccttgccgcggagccccggccggggcgctcattcccttgatcttgctggtcagaccgatggagcgcccatgccgctggacgatttccgcattacctcaggcaagcgttttcgccttgccgacttcgacccgggcagcaagccgctgtcgtgcggcaagaaagaagaagacctggcccgcatcatcgagctgagcaacgccctcgacgcgcagcaggatatcttctacgccgagcaccggcgcaggctgctggtggtgctgcagggcatggataccagcggcaaggacggcaccgtgcgcggcgtgttccgcagcttcgatccgctgggcatccgcgtggtgggcttcaagtccccgtcgccggaggaactggcgcgcgactttctatggcgcatccacctgcaggttccgaagacgggcgagatcgtggtcttcaaccgcagccactatgaagacgtactgatcacgcgcgtgcacaactggatcgacgccgccgagtgcgagcggcgcttccgccagatccgggacttcgagtcgatgctgaccgagaccggcaccaccatcgtcaagtgcttcctgcacatatcccgcgacgagcagaaggcacggctcgaagcgcgcctggcggatccggagaaacactggaagttcgacaccaacgacctcgcccagcgcaagcactggaaggcctacatggacgcctacgaggctgccatcatggcgaccagcacgcccgaatgcccgtggtacgtggtgccggccgactccaagacacaccgcaacctgatggtggcggagatcctgaccagggtcttcgaggacctgaagccggcctacccgcccgcccggccggaactggccagtaccaaggtcgactgagccgcccggccgcctcagccaccgttgccgcggtgcacgtcgtgcgtgacgaaggggtgctcgcggctgggcatcgccagccattgggggtggcgcagggtctggcggatatcgtccagcccgctggtccagtgctcatgcatggtgagcgcgccgaactggtagtccttggccaggttctcgaacgacttgtcgcggtagatcagctggattacgttgcggcgcgcgtcgcaggcctgctccgccgcgcggcggtaccaggcgttgtcgcgctttgacggcggcaccagcgccatcacctcgttgagcatgcggcgcatgttctgctgctcgcgcatgtagtcggtaatggcccgcgtgcggctggagtactggatgtccttctggcgctcggccacgtcgaccaggtcgtgcggcagcttgccgcgcgcgctccacaggtcgacctggaaaatcagcgcgtcgcgccgcggctgcgccgtcagcacctcggccagcggcgtgttcgataccagcccgccatcccagtagtactcgccatcgatctccaccgccggaaagcccggcggcagcgcgcccgaggccatgaaatgctcggggcagagcttgtcgcgggtattgtcgaagtaggcgaaattgccggtgcgcacattgaccgcccccaccgagacgcgcatcaggtcggggcggtggttgatcaggtcgaagtcggcaaaacgctcgagcgtcgccttcagcggcgtggtgtcgtagaagctgacatggctcgggtccgagtagcgcgacatcagctccggccagccgcgcggctggaagaagccacgctggccttccagcatggcacgcgctgcatgcaggccatcgaaccagatccgcattggctcgggccagccttcggcatggtcggcgaaccaggaatgcgacaggctgggcagccacggctgcgcgcagatgtactcccagaaggcgcgcagttgttccacgcggcgccggggcggattgccggcgatgatggcggcgttgagcgcaccgatcgagatgccggcaacccagttcgggtagatgccgccctcggcaaggccctggtacacgccggcctggtaggccccgagcgcgccgccgccctgcagcaccagcgcgcgcacggcataggcctcgtgcgccggccggtccggggccttggcggcccggcgcaccggcttgcgcggctgcacctgcgcgccgcgttcggccagggaatcggcattggcgccgctttcagccttggcctgcgttggctgccgtgccatctgccgtgccgtcttttcctgccgctcttgcggcacttgccgtacttgccgctcctgccgttctttttccgccacgccgcgctcctgccgattggaaagtccgcctgtccgccagatgctgaacgggcgccgcttggcggcgccccttgccatcaacggtttcagacgccgtagcgctgacgataggccgccaccgcctcgcgcgaggccgacagcgcggggtcctgcgacgcatcgaggtaagccagcaggtccttcaggctggcgatggcgatcaccgggatgccatactcacgctgcacgtcctgcacggcggaatgggtgccgacctgctcggcggtaccgctcttctccatgcggtccagtgcgatcagcaccgcggccggctcggcgccggcggcgcggatcatgtttaccgattcgcgcaccgaggtaccggcggagatcacgtcgtcgacgatgaccaccttgccctgcagcttggccccgaccagcgtgccgccttcgccgtggtccttggcttccttgcggttgtaggcgaagccgacgtcacgtcccatgccagccagcgccaccgcggtggccgacgccagcgtgatgcccttgtaggccggcccgaacagcacgtcgaactgcacgcccgaggccagcagcgttttggcatagaattgcgccacctcgcccagcatcgcaccctggttgaacaggccggcattgaagaagtaaggcgacttgcggccggccttggtgacgaactcgccaaacgacagcacgcccgcatcgagcgcaaagcggataaaggtctggctgagatcggcacccgcgggcggtttctgctgcgtcatcatttctctctgaattcaaaatttccccgaatgttacggattatcagcgccaacctcaacggcatccgctccgcgtcgaagaagggctttttcgactggatgggcaagcaggacgcggacatggtctgcgtgcaggaactgaaggcccaggaggccgacatgaccgaagcgttcctggcgccacatggctaccatggttttttccattacgccgagaagaagggctacagcggcgtgggcctgtacacgcggcacaagccggagcgggtggtcaccggcttcggtaattccgagttcgacagcgagggccgctacgtcgaagtgcagtatccgcacctggcagtgatctcggtctacgtgccgtcgggttccagcggcgaggaacgccagcttgccaagttccgcttcatggaagcgttcctgccgcacctgttgcaactcaaggcgagcgggcgcgagatcgtgctgtgcggcgacgtcaacatcgcgcacaaggaaatcgacatcaagaattggaagggcaacctgaagaactcaggcttcctgccggaggagcgcgcctggatcggcgaactgttcgacgtccatggctatgtggacgtgttccgcaagctggatccgcgccccgagcagtacacgtggtggagcaaccgcggccaggcctatgccaagaacgtgggatggcggatcgattaccacctggccacgccgaagatcgccgataccgcgcggctttgctcgatctacaaggacgagaagttcagcgaccacgcgccgctgtcgatcgattacgactatccgctctgagcgcagccatcaggccgcccggacctcctcaagcagttccgggtggcggtccagcagcctgagcagttttaccagcgcaagcggcggcttggtccggccagtctcgtagcgcgagaatgcattgaccccgccgccgaagatctctgcggcttcgcgctggtcgaggtggagtttcttgcggacttgcatgatgtaagtcggatcgacaagcgaggcgttgacttgcttgttgaaggcgagcgccagcggtccgatccgctcttcctcttcctggcccagcacaccttctccacactgagcacaccagtcggcaaggaccgcttcgattaccgtggactcgccacggtaggtatagacaaagtctttccgccccctttcgagttcggcgcctccacataccgggcatcgcatagacagctcctctggcaaggcggcgcacgcgctagcgcgccttgaacgacacaatcaggacttcctcggtcaccgtcagcttcaggtatatcgctccatacgatgtgcatgggcgatacacatcctgccagacggtatggtcgacgtaggtcgtcatgcttttgtagaagtcggcgggctggatcctggcgactacatcaaggacgtcgccgcgggtgagacacatgttcctggcgccctggaacgctgccatcgtcaagctgacccgccctgccgcaatcaactcccggacccgccacagcgggtcatgcgccgttcccttccccgcgcaaattaacctacttggttagatgctgcaagccgcgaactgtgccaaatcgcaataatccaatccgtacaaacccctgcgaccggcccccatccccgctacaatgcaggttccccacagcgcccggcaggggagatttctcatatccaaagcattcccccgcacttcattgagtgagtcagccatggttttcaaagtgttcgtcgatggtcaggaaggcaccaccggtctccggctgcttgactatctttccggccgttccgacgtggaactgctgcgcattgccgatgacaagcgcaaggacccggccgaacgagcacgattcctgaatgccgccgacgtcgccttcctgtgcctgcccgatgtggcctcgcgcgaggcggtatcgctggtgaccaacccgaacacctgcgtgatcgacgccagcacggcgttccgcaccgccgacagctgggcctacggcctgcccgagctggcgcgcggccagcgcgagaagatccgcgacagcaagcgcattgcggtgccgggctgccacgccagcgccttcgtgctggcagtgcgtccgctggtggacgccggcgtgctgccagccgactacccggtttcggcgttctcgctgaccggctacagcggcggcggcaagtcgatgattgccgagttcgaagccggcggtaacccgaagctggacagcccgcgtccgtacgcgctgggcctggaacacaagcacctgcccgagatgcgcgtgcaggccggcctggcgcaggcgccggtcttcaacccgatcgtcggcaacttcctgaagggcctggcggtgacggtgccggtgttcacggaccggctggcgcgcaaggtcagcgccgagcagatcgtcgagatctaccgcaagcactatgaaggcgagcagttcgtgcgcgtgatgccgtacaacagcgccgacaacctcgacggcggcttcttcgacgtgcaggccaacaacgacaccaaccgtgtcgacctgttcgtgttcggcaatgccgagcgcctgaacctggtggctcgcctggacaacctgggcaagggcgcggccggcgccgcggtgcaatgcatgaacgtgcatgtgggcgccgacgaggccacggggctgcgcgcctgacgctgcagccagccctgaatgaggaaaaagccggcattgccggcttttttcattggcgtcagcggaccgctcagcgttgcagcggcttttgccggtcgtcgtcgccgctgtccaccggcgcgccgcccaggcccgccatattggcgcggtatggcggcagcttctccaccgtggtattgctcgcgcgcgcatagagcggcagcacctccggcaggtgcttctccaggtcggcgatgcggctccgcccggacggatgcgtggacaggaactcggtgccggactggctcaccttgcccattttctgccacagcgacaccgcggcgcgcggatcatagccggcgcgcgcggcgatatccatgccgatcaggtccgcctcggattcatccgcacgcgagaagcgcagcgtcagcaggtgggcgccggtgccgagcgccatattgccaaggttgccgaagccgaacagctgcgagatcacgttggcgccgaggttggtgatctcggacttggcggcgcgctcgcgcgcatgctcctgcagcgcgtgggcgatctcgtggcccatcgccatggcgatctcgtcgtcggtcagcttgagctggtcgagcaaccccgtatagaaagcgatcttgccgcccggcatgcagaacgcattgacctgcctggagccgatcaggttgatctcccactgccactgccgcgcgcgctcgttccagcgtgcggtctgcggcagcagccgcttgccgatcgtgcgcaggcgcaccagctgagggttgtcggcggcggccagtgcatgcttggcgatggcttcctgcttgagctgctcgtattcctgcgcggcctgctgctcgatggcctcgaccggcacgatcttgcgcacggccgagccgctgcggtccagccggatgccgccagcctcgctgtcctgcgcctgggcgggcaggcaccaggccatgggcgccgccaccgcggccagcgccagcgcgcggaccagccggtcacgggtaggacgctgaacaccttgcaggcggcggagcatttgcggttcctcggacgcagtggaagaccaggcaggcggatcggtgatccgcggcaacgatgccgtgccgcatgtggcgggcaggcaaacaggtgatgcaataatacacggcgcccgcgcagccgcgcggcgcttcacgccggcccgttcatgaccttccagacctatctcgatatcttccgcaaccgccgcatcggcgccatgctggcgctgggcttcgcctccgggctgccgctggcgctgacctccggcaccctgcaggcatggatgacggtcgaggggctggatatcaagaccatcggcttcttctcgctggtgggccaggcctatatcttcaagttcctgtgggcgccgctgatggaccgctacacgccgccgctgctggggcgccggcgcggctggctgctggtgacgcagctggggctggtgctgggcatcgccggcatggccttctgcccgccgcgcgaggcgctgtggacgctggcggcgctggccacgctggtggccttcctgtcggcctcgcaggacatcgtcttcgacgcctacagcaccgacgtgctgcgcccgcccgagcgcggcgccggcgcggcggtcaaggtgctgggctaccggctggcgatgctggtctcgggcggcctggcgttgtggctggccgaccgcgtgctgggctggcagcagacctacctgctgatggcggccctgatgggcgtgggtatcgtcacgctgctgtgggcaccggaacccgacgtgcccgcacgcgcgccgcgctcgctggaagaggcggtggtcgggccgctgcgcgacttctttggccgccagggcgcgtggtggctgctgctgctgatcgtgctgtacaagctcggcgacgcctttgccggcagcctgtcgaccaccttcctgatccgcggcgtgggcttctcggcgggcgaggtgggcatcgtcaacaagaccctggggctggccgccaccatcatcggcgcgctgttcggcggcacgctgatggtgcgcctgggcctgtaccgctcgctgatgctgttcggcgtgctgcaggcggtgtctaacctgggctactggatcctcgcggtgacgccgccgcacctgtggaccatgggagcgaccattgcggtcgaaaacctgtgcgggggcatgggcacggcggccttcgtggcgctgctgatgacgctgtgcaaccgctcgttctcggccacgcagtacgcgctgctgtcggcgctggcgtcggtgggccgggtctatgtggggcccacttccggctatatggtcgaggcctggggctgggcgccgttctacctgggcaccgtggtggtggcgctgcccggcgtgatgctgctctgggccatgcgccacaccgtgcatcgctacgaggcccaggcgcgcgaagcgatcgcctgagcccgcgcctgcctcactccttgtagtagacgatctggtgcgagctggcgatcagctcgccgccggcgctccatagctgcgcgcgctggtcgaagaagccctgcctgaacacctgcgcctgcgcgctggccagcacgtggctgtcgcccagcgccgccagcgtggccgcgtcggcatggaaataggtggtcatcgacaccgtgccggccggcacgaagcccgcgcgcttgaggaagatgcgcgggtagaagctgtcggcccaggccgccaccgcggcaaagtccggcgtgcgcgccggcgcgtcgcgcagccagaactgcgtcaggctgtccgggtgctcggtgccggcctcggcggtcggcttggcgccgcgcaccgggcgcatgtcgtaggacttgagccagcgcaccggcgcaaacccgttcatcgccacgagggcttcggccgccggcacctccggcatcagcgcctcgccgcaggcccaggtctcgcggcgcaccgcaaacatggcggtggcggtggtggccacggcatcgccctggcgcagctccagcgtccagtgctgggtcgagcggttggtgcgcaccgggcgcgcctcgatctcgaacgggccctcggcgatcggcccggcaaagttgaccgtcagcgagaccgggtcgcccaggcgctgcggatggtccagcgccgcctgcagcagcgtggcggcggtgatgccgccgaacggaccgatcatgttccagtactcgggcgtggtgcggcccaggaagcggtgctcgccggccggctccagcgccagcgcgtcgtcaaagggatggagcggcctggcggcggtggccgcccgggtctggggcgcagtggacatggctggtatgggttggtgactcgcagggaatagcacgatcgttcgatcgtgctgcctacactaaccgtagtcagcgttcgggtcaagacgccaatattccagccgctggcaccgtggtgcccgcatcagccttgcacccgccgccgcagcggcaggctccagcccagctggttggcgaccacgcccagcagcaccagcgccatgccggcgatctgcagcgggcccagcaccacgccgaacaccatcacgtcgatcacgatcgccaccagcggatagataaaggacagtgtggcgatcgacaccacgttgagccgctggaacgcgccatacagcagcgtgtacatcacgcccgtatgcaccagccccagcgccagcagcgcggcccaggtgccggtgccatagctgccggccgcgggatgtgccagcggcgccagcatcagcacgcccagcaccatctgcagcccggcgatctggcctggcgggatggcctgcagccgccgcgtggccagggtcgtcaccgcatacagcagtgccgccagcaggcccaggccgatgccggccagcatcgcagtgccagtggcgccatgctccagcccggtgatcagcatcaccccggcaaaggccagcaccagccatggcagccgcgcgaacgggaacggctcgcgctggatcaccgaggtcagcagcagcaggaagaacggctgggtgtggtagaccaccgtggcaatggcgatgccgctgtacgcatacgccgagaacaaggccagccagttgagcaccagcgtgacgccgcccagcgccagccagccaagctgcgcgcggctcatccgcacccagccgcgctgcagcgtcagcacgcccagcagcgccgcgccgccgaacaggcagcggaagaagaccacatcgagcggcggctggccgctggtgaccacgaaccagccgatggtaccggacagcagcatggccgcgaccatgcgccaggcgccgcctggcaagggttgttgcgagggcatgacggactccggtcagacaatggccgcattgttccatcatgcgatctgctcaacaatcccgtcagagctcaattagtatttgatctgaagtcaaagaaagaggacgtgccatgccggatatgccacttaatgcgatggccgtgtttgcgcgcgtggtcgagtgcggcagcttttcggctgccgcactcgacctgggcatgacgccgtcggcggtcagccggcacgtctcccggctggaagccacgctcggcgccagcctgctgcagcggaccacgcgcgcctttgcattgactgagctgggccagtcggtctacgccgcctgcgcccgcatgaccgcggcagcgcgcgacgtcaccgcgctggccggcgagcacggcggcacgccgcatggcgtgctgcgcgtgagcgcgccggtctcgttcgggcaggcctggctggcgccgcggctgccggcgctgctggccagatacccggggctggacctgcagctgacgctggccgaccgcatggtcgacctggtcgaagaagggatggacgtggccgtacgcatcgcgcgcgaactggcgcccgggctggctgcgcgcccgctgcgcgaggtgcgctaccggctggtggcctcgcccggctacctggcccgccacggcacgccggccacgcccgccgacctgcccgccgcacgctgcctgtacctgggctacggcaacttcggcgagcgctgggccatgcgccaccaggccggcggcgagaaagtggaggtgcgcatcccgccgcgcctgacgctgaacaacagcctggcgatcatgagcatggtggagcgcgatgccggcatcgggctggtgccggacttctcattgggcgatgcgctggaccagggccgggtcgtcaccgtgctggccgactgggacatcctcgaaccctacatcggcacggcctacgcggtctacacgcccacccggcatgtaccgcccaaggtgcgcgcctttgtcgatcacctggccggcaccgccgacgacgcgccgcgctgatcaccgcgccgactggcccaggacccggcgcagcaaccacagcatcgcgccgcgcacgcgcacggcatcggccccggcctcgatctccagcgcggcccggtcgaatgccgccgacagcagcggcgccacatcgccctgcgggtccacgcccgcggcctccagcccctcgcgcagcgtgcgggcggcgttggcgtcgtccagcgcgagcatttcgcgcagtcccagcaccgccggcccttccaccagcagcaggcgcgtgcggcccggcaccgtcattgcgtccaggtaggcctgcgccccggcgatcagggcgtccgcggcatccagccccgcgggcgccgcggcttcaatatcgtccgccaccgcggcagcctcctccgccagcacgtgccggaacaggtcgcgcttgtcggcgaaatggtggtacagcgcgccgcgcgtgatgcgggcggcggcgcagatgtcaggggtagaggtctccccgtagccgcggctgacaaacagcgtgcgcgcggcatcgagcagcgcctgccgggttgcctcggtacgttcgcggttggatctggccaccattgcctccttgcatacatgcagcctgtatcttaatatggatttacatacaggctgcatgtatctgaataacagaggagcatccatgaaaatcaccagctactaccccgtcatcatgaccggcgaggttgccggcacggccgcgttctaccagcgccatttcggctttgtggcgctgttcaccagcgactggtacgtgcacctgcaactggccggcgatccgtcggtcaacctcgcggtgctggacggcacccacgagaccatccccgccccggcccggggccagcgcgccaggggattgctgctgaacttcgaagtggaagacccggatgcggtccatgaccgcctgcgggcggccgggctgccgatcctgctgccgctgcgcgacgaggccttcgggcagcggcatttcattaccgccgacccgaacggcgtgctgatcgacatcatcaagccgatcccgccgtcgggggagtttgccgcgcagtacgaggcgggcgcgctgcccggctgacgcgcctggctcaggccgcgcagacccggtacaccgccaggctgccgcgccagttgccgccccagttgacggtcacgccttcgtgcatcaccacgcggtcgatcacgcgcaggccgaccttgggcgccagcgcctcgaagtcgctgatggtcagcacgcgcacattgggcgtgttgtaccactggtagggcagagattccgataccggcatgcggccgcggaacaccgacagccggtgcggccagtagccgaagttcgggaacgagacgatgcactcgcgccccacccgcagcgtgtcgcgcagcacctgcgcggtgttgtggatggtctgcagcgtctgcgacaggatcaccgtgtcgaagctcttgtcctcgaacagcgccagcccgccctccaggttctgctggatgacatggacgcccttctgcgcgcacgccagcacgccttcgtcgcggatctcgatgccgtaggcctgcacgtcgagttcgtcctgcagcacgcgcaacaggctgccgtcgccgcagcccaggtcgagcacggtggaatggggttcgatccagcgcgcgatcgcgcggaaatcggggcgcagcgccaggatattgggattggccagtgcgttcatgcgccgatctcctctgcgatgcggtcgtagtaggcgcgcatcaggttgtgatagcgcgggtcgtcgagcaggaaggcatcgtggccgtgcggcgcatcgatctcggcgtacgagaccgggcgcttgttgtccagcagcgccttgaccagctcgcggctgcggctgggcgcgaagcgccagtcggtgccgaagctcgccaccaggaagctggcctgggtctgcgccatcgcgcgcgtcaggtcgccgccgaaggccagcgccgggtcgaagtagtcgagcgcgcgcgtgatcagcaggtaggtgttggcgtcgaagtattcggcgaacttgtcgccctggtagcgcaggtagctctctacctggaactcgacatcgaaggagaagcggatgtcgtcggtcttcagctcgcggccgaatttctcggccatgtcctcgtccgacaggtaggtgatatggccgatcatgcgcgccacgcgcaggccgcgcttgggcttgacgccatgcgcgtagtagttgccgccgtggaagtcggggtccgacaggatggcgctgcgcgcgacctcgttgaaggcgatattctgcgccgacagcttgggcgtggacgcgaccacgatgcagtggcgcaggcgttccgggtacagcaggctccaggccaccgcctgcatgccgcccaggctgccgcccatcaccgcggcgaactgcgtgatgccgaacgcgtcggccacgagcgcctgcgcattgacccagtcttccaccgtcaccaccgggaacgctgcgccgtagggcgcgccggtggccggattgaggctcatcgggccggtcgagccgaagcacgagcccaggttgttgacgccgatgacgaaaaagcgattggtatcgagcggcttgccgggcccgaccatgttgtcccaccagcccacgtcgcgcgggtcttccgcatagacgccggccacatggtgcgaggcattgagcgcgtggcacaccagcaccgcgttggagcgggccgcattgagcgtgccataggtctcgaccatcaggtcgtagccggcaatggacgagccgttgcgcagcttcagcggctcggcaaagtgcatgcgctgcggcgcaaccacgccgaccgaatcgggcggcaggtcgaacgcggcaggcgcggcggtcggcagggcgacatcagtcatggaatccggcccgtggcgaacgggcataaaaaaacccgaccggcatttgcgtataaagcgtcgcagccaagtcgggattcactggattccttgcgggattccgcgtgccggcgccatccactaccgtggaggcatggggcgccgacccaacctctttagccgcatttgtagtggcaacccggaacttggtcccttggctgccgcgcgcccgcaagccagtcatcaaatcggcgcgaccgggcaattatagagcaatcggcccggcatgttgatttagaacccatttcacattgaagatgggcacgcgttcaagccaggcgcggcgcaggctaggcgcgggccgccggccttggtcattccaaggtcaaggcccgtaacgacgcatgcgccgcgcctggcttgaacccgaagggaaggctgctgccgggccccttcttcattgtgaaatgggttcttaacccagcaagaccctcaggtgcgcctcggcatggtccgacggcgacttgcggaagccgctcttggcatagcggtgccactggccctgcaccgccgccatgatcagcgccgcgcgtgcgggaatatcggcatccgccgggaacgcggcctgcgtcaccgccatcttcaggcactggcgcagcgaggcctcgatgcggtccaccacctggttgatgcgctcctgcaggcgttcgtgctcgcccaccagcgcctcgccggtcagcacgcgcgtcatgccagggttcttctcggcaaacgacagcagcatgcgcacaatggcgtgggcctggcgcaggccgtgctcttccttgtcggtgatctggttgatcaggccgaacacggtctgctcgataaagccgatcaggccctcgtacatctgcgccttgctggcgaaatggcggtacagcgccgcctccgacacgctcaggcgcgcggccagcgccgccgttgtgatcttctccccgcgcgggtgctccagcatggtggccagggtctgcaggatctgcacgcggcgctcgcccgggcgcgggcgcttgcgcgccggcgtggccggcggctggcctccgtcctgcgcatcctgcgcactgcctgaaatgaccgcctctggctcgcgcccgttgctttgcgtcatgacccgattctccgcattcgtcgttggagttgatgcatcgattgtacttttatgtccacataggccggccggttcggcacgcgggcgcgcacgcgccgcacgttgtcgggctgcgcctgcggtgcctgggtctccgcagccaccagcgtcaccgactgctcctgcgcggcgtggccgacatggcgccggtcctccgcctccagcgtcgagcgtaccgcggcatcgcgccggctgccgtcgtcgcgcaccgcgggcacctcatgcgggcgcgatggcgcgatcgtgcgcaggtagcccgtcacccacgcggtgcggatgccggtgccggcatagcgcttgaggtgcgacacggtgtcttccaccagcaccgcgcgatgtggcgcgatgcgggtctgcaccagcaaccggcgcagcatgcggcggtccggcttgggccgcaggtggccatgcacccacatctgctcgattgccaccacgcgctcgaagcaatgccgtatgcccgctatctccagcaccgcccgcgcgtagtcctgcggcgcattggtgaccaggatcttgcgccccggcaggcgccgcaggtgcgcggccagcccgcgccgcacccgcaccatgtcggccagcgccgggaattcatgcgcggcgcgcaggaagtcagccggatccacgccgtggtgccggatcatgccgagcagcgtggcgccgtagcgctgccagtagtccacgcgcacgcggctggcggtggcctcgtcgcagccgagcacgcgcgccacgtagtcggtcatcagccggttgatggccgggaagatcgcgtgcgaggcgtcgtgcagggtgttgtcgagatcgaacagccagaccgtatcgcccgaggtattgcccgcggggcggcggcagaggcgagcgcggacacggcgcggagaaggaagacttgaaggcacgccgggcaaactcggagggtgatgggataaccggggcggccggccgctgccggcaccgccccgaggctccgctcagtgcgagcggatcatggtgccgaaggcctgctcggtcaggatttccagcagcagcgaatgctcgatgcggccgtcgatgatgtgcaccgaatgcacgccgctcttggccgcatccagcgccgacgagatcttcggcagcatgccgcccgagatggtgccgtcggcgaacagctcttcgatctcgcgcgcggacaggtcggtcagcaggttgcccttcttgtccatcacgcccgggatgttggtcatcatcaccagcttctcggccttcaggatctcggccatcttgccggcaaccacgtcggcgttgatgttgtaggcctggccgtcgtcggagaagccgatcggcgagatcaccgggataaaggcgtcgtcctgcagcgccttgaccaccgcggggttgatcgcctcgatgtcgccgacgtagccgatatcgatgaacgcccccgggttctcgcggtccggcatctgcaagcgcttggcgcggatcaggccgccgtccttgccggtcaggcccacggcctggccgccgtactggttgatcagcatcacgatgtcctgctggacctcaccgcccagcacccactcgaccacttccatggtctcttcgtcggtgacgcgcatgccctgcacgaaggtgccgaccttgccgaccttcttcagtgcctcatcgatctgcgggccgccgccgtgcaccaccaccgggttcatgccgaccagcttgagcaggatcacgtcgcgcgcgaagccatgcttgagcttctcttcggtcatggcattgccgccgtacttgaccacgatggtcttgccgtggaacttgcggatatacggcagggcctcggcgaggatctcggctttcagcgcgggagcaatggcggccaccgtggttgcggcaggcccggggttgtcggcgttcatgggggacatccgtgagaatcaacaggtatgatggctaatcggccacgtagccagggataaccaacggggatcgcccgaaagtgcgccatccggccatggcaggcgccgattttacaagaaaccgcgcggggcgcgagtcaaccggccgaacgtggtcccgcgaaccgcctgcaagcgccccacggggcaccaacgcgttccgtccacgcaacaacgtgccaccactcagccgtttggcctgcgccgcggcacagcgttccccaccttgaccatcatgcccgccgccagccgcctcttgccagcccgcatcccagcccgcatccccgatttcccgccagcgccgggaagccagccatgagcgacgcctcgaccgtgctgaccggccagctgcgcccggtcgaacattgcagccactgcggcgcgggctttgtctgcggctacgtggcggggctgcccgagtgctggtgcgccagccagccgctgctgccggcgcggcgcatcgtgccgggccagcattgcctgtgtccggcctgcctggcagcgcgccggcaagcggctcaggaacctgattccgccgctggctgaggcgccggcccgggccctgcggcactgccccactgcatcaccagcatccccgccacgatcagcgccgcgcccgccagccgcgccggcgtgagcgcgcgcaccgcaaatccggccagcccgaactggtccaccagcagcgccgccagcacctggcccgccaccaccgcggcgataaagcccgcggcgcccagcttcggcgccatcatcagcgcggccgaaatatagaacaccccaagcaccccgccgatccagagccagcccggcgcgcgcgccagtgccgctggcgccggcagcggcacgcgcatcagccacagcacgggcagcagcgccgccaggctgaccagcagcgacaccagcgtggccgacagcggatgcccgagtgtgcgcccgagggtggcgttggcgccggcctggaaggggatcgccgcgccggccagcacggccgtgccaagcggcagccagagtgaaaccgggaaggaaaacggcaactgggtgcctgacatgaagcgctccatagggcaagatgcgatgccagcagtttgaaatatcgcaatgcgaatttccaattctgctttcgtacgtttattattcgccgaatgaatagcctacgcggaatcgacctcaacctgctggtggtgctcgaagcactgctggccgagcgccatatctcccgcgccgcgctgcggctgcacctgagccagccggcggtcagccacgcgctcgggcgcctgcggcagctgcttgacgaccccatcctggtgcgcggcaagggcggcctggtgctgagcgcgcgcgcccatgagctgtccggcccgctggccgaggcgctggcgcaggtgcgcatcctgctggggccgagcggcttccagccggccaccgcgcggcgcagcttccgcctggccatgtccgactacggtgcgctggtggtgctgccgcggctgctgcgcgcggtgcgcaaggccgcgcccaatatcgacctggtggtgtcgcaggccagccgcgaaggcatgaccgcccaggtggccgatggcgagatcgacatggcactgggcgtgttcacccaccagccggaaggcgtgaaatccgccgagctgttctgcgagagctatgcctgcgcggtggatgccgccaccgtgcgcgacagcggccggcttgaccaggtggcctacctggcgcgctcgcacgtgctggtggccacgcacagcgaacgcatggacgcgatcgacacggcggtggccaagctggggggacggcgcaagatcgcctgcgtggtgccgcactggagcgtggcgccggcgctgatcgccgggaccaacctggtgctgaccacggcacggcgcagcctggccgcgctggaagaggacccgcgctacgccgtgttcgcgccgccgtttgcgctggacgacttcaccttcagcatgatctggcacgagcgcaccgaagccgatcccgcccacgcctggctgcgcgagcgcgtgctggccgcggcggccagtcaggaatcggaagagccgatcagcttgcgcggctgacggcgcacccccggcttggctggcgccgggggctgggcatcacggcgctgcgcgggaacagcaggtggcctggcggggcgcgtgtcgccgcgaaagaccagcttctgccgggtgccgtgctgcttgttggccatgatggctggatgggtggatggacgaggccggccccgtcaggcgctcagtgcttgtgttcgccgtggccgccgctcgcgccggcggcggcgggcaccatgtcacgcacttcagccgtgaccttctgctcgatcatcttgccgccctgctcgatcttcagcgtgatgggcacggtgtcgcccttcttgagctgcgccttcaggtccatcagcatcacgtggtagccgcccggcttcagctcgacgtccttcatctttggcaggtccagcgacttgacctggcgcatgcgcatcacgttgccttccatcttcatctcgtgcagctcggccgcggccaccggcgacgacacgccgaccagcttcgcgttgtcgtgcgcgtgcagcaccatgaaggcgccggaggcagtctgggtcggcaccgtgccgcgcacccaggcattgctgacatcgacctgggccagcgcggcgccggacgccagcgcggcggcgagggcgaccgatgcggccagcgtggccgagcggaatttggcttgcatgaaaggctctcctgaaagcagacattagaccatggcgatgcccgcccgtgcatgccccaggcaaccccgccatgcggcgcacagccggctagtctggcagcccgacaagctcggcgccaatgcggcaaggtgtcgcacgcaccggcgccccgcggccgcattgatacactcgcgccatgaccaccgccgcagccgtgacccgcttgcccgacctccccttcctgtcgccactgccggcgggcacctccgcccgccatggccaggtgacgctgcgccggctgttctggctgcgctgggcactgctggcgggacaggcgctgaccgtgctgagctgcgagcccatcgccggcatccgcctgccctacgggccgctgctggtggtgttcggcctgcaggcgctgttcaacctgctgaccggcctgcgcctgcgccagcacacgcggcgcaacagcgcccctggcgaggccgagctgatgggccagctgctggtggacctgaccgcgctgtcggccatcctgttctacaccggcggcgcgaccaacccctttgtctcgttctacctgccggggctggccattgccgccgccatcctgccgtggcgccaggtgatcgcgctggcgctgtacgcgctcgtctgctacacgctgctgctgttcgaatatgtgccgctggacctgcacaacccggacaacgcggtgaactaccacctggccggcatgtggctgaacttcgttgccagcgcggtgatgatcgcgctgttcgtggcgcgcctgtccggcgtgctgcgccagcgcgaggcgcagctgaacctggcacgcgagcagctgctgcgcgaggcgcgcgtagaagacctgaacggccaggccgccgcggtcgcgcatgagatcggcacgccgctggccacgctggcggtcatcgccggcgagctgcgtgccgatgcctccgacgcgggccgcggcacctccgcaatcaacagctacctgcccgacctgcagaccatggagcagcagctggcgctgtgccgcaccacgctcgcgcgcctgcgcgaagacccggccacgctggcgccgcagcgcatcgacggctggctgccggcctttgccgagcgctggcagctgcgccaccccaacgccagcctgcaggccagcgccacgccgggcgccggcgcgcaggcggtggaaaccgcgcgcgtgggccagatcctgaccatcctgctggacaacgccgcgcgcagccagcaagccgccggccgcggccaggagccgctgcagctgcagatcgccatggcgcccggcaataccgcgccgtggctgtcgttccgcatcgccgaccacggcgacggcattcccgagatgctgcgcggccagctgggcgaaaccccggtggccagccagcacggcggccagggcatcggcctgtacctggcgcaaagcgccgcccggcagatggacggcgaactggcctggcatgaccgcgccggcggcggcaccgttgccgagctgcgcctgcccgcgctgtccaccctttccgcatccgccgccgccacggcaccacgaaccccatgaccgacaccctcaccccggtacccgaagccaccgcaccggctggcacgcccttcctggtcatcgacgacgacgaagtctttgccggcaccctggcccgcgcgctcacgcgacgcggctatgccgtgcaggtggcgcatgacggccgcaccgcactggcgctggcatcacgcatcgagtttgcctatgtcacgctggacctgcacctggagccgccgccggatgccggcagcaccgtgcccgccgaatcggggctgcagctggtgtcgccgctgcgccaggcgttgccggacgcacgcatcctgatcctgaccggctacgccagcatcgccaccgcggtggcggcggtcaagcaaggcgcggacgaatacctggccaagccggccaatgtcgattcgatcctgaccgcgctgatggcgggcgtgtccgaagatgcggcgcaggccgcgctggaagagccggtgccgctgtcggtggcgcggctggaatgggagcatatccagcgcgtgctggccgagcatgacggcaatatctccgccacggcacgggcgctgaacatgcaccggcgcaccttgcagcgcaagctgggaaagcggccggtgtcgcggtaaagaaaaaggccgcgcggattgcgcggcccttccggtggcaactgctgccggcgttacaggcgcaactggacgtagtcccagtccagcccgtcggcgctgccctgcggcgtgctgccctgcgcgacgatgcgcatggcatcgccggcatgccggtcggccagcgtgaacaggccgccagaatccagcgccagcttcgcggccgcggcagtggccgcgccgcgcgagcccgattgcgcagcctcggcggcgggcacggcgggacggatgcaaaggaaggccgtcgcggcggccagcgcggccagcaggccgcctgtggccagcacgacacggcgggtcttgtaatggaccattcgatttctcctgccagtgagttgagtgggatgcggtggctcccgcaccggtcaatcgaccgtcaaggtgacgaagggtcgcattgtcgggccgttgcgcgccagcgtgcttaccaatgcttacgctccttacccgcatgtggcagccggatacgtacggatatgtgaaatccgttcccgccaggggcggaaactggcccacagacgcaaaaagggcgcaccgtggtgcgcccctcccgcattccgcccgtattgccttacagcacgtagcgcgacaaatcctcattgaccgccaggtcacccaggcgctcatcgacatatgccgcgttgatcgtcacggtctcgcccgacgacttggtcgcatggaacgacaggtcttccagcagccgctccatcaccgtgtacagccggcgcgcgccgatgttctccaccttctcattgaccgagaaggcgatctccgccagccggcggatgccgtcatcggcaaacaccaggtcgaccgattccgtgctcagcagcgcctggtactgcttggtcaggctcgcatcggtctgcgtcaggatagcctcgaagtcctgcacggacagcgaatccagctcgacccggatcgggaagcggccctgcagttcgggaatcaggtcgctcggcttggacaggtggaacgcacccgaggcaatgaacaggatgtggtccgtcttgatcatgccgtacttggtgctcaccgtggtgccttccaccagcggcagcaggtcgcgctgcacgccctggcgcgacacctcgccgccgccgatctcgctgcggctggcgatcttgtcgatctcgtccaggaacacgatgccgttctgctcgacattggcgatggccttgtgcttgagctcctcgtcattgaccagcttggcggcctcttcgtcgatcagcagcttgaaggcttccttgaccttcatcttgcggcgcgccttcttgccctggcccagcccggcaaacatggtgcggatctgctcggtcatgtcttccatgcccggcgggcccatgatgtccatgctcggcatgccggcggagagttccagctcgatttccttgtcgtcgagcgagccttcgcgcagcttcttgcggaacacctggcgcgtgttggaatccttctcttccggctgcgagaaaccgatatcgcgcgccggcggcagcaatacatcgagcaggcggtcctcggccgcgtcctcggccttggtgcgcaccttcttcatctcggactcgcgcgtctgcttgatcgccatctcggccaggtcgcgcacgatggtgtcgacatcgcggccgacatagcccacctcggtgaacttggtggcctcgatcttgatgaagggcgcgtcggccagcttggccaggcggcgcgcgatctcggtcttgccgaccccggtcgggccgatcatcaggatgttcttgggagtgatttcctggcgcaggggctcggccacctgctggcggcgccagcggttgcgcagcgccaccgccacggccttcttggccttgttctggccgatgatgtgcttgtcgagttcggaaacgatttccgacggggtcatggtgtgcgacatggtatccgttcagtgggggcgcgccggcctgcgcggtggccggcctgcgcttattccagcgtctcgatgacgaagttggtgttggtatagatgcagagctcgccggcaatggtcagcgccttctcgaccacgtccttgggcgccatttcggtgttctcggccagcgccttggcggccgactgcgcatacgcgccgcccgagccgatcgcggcgatgccgccctcggggtcgagcacgtcgccgttgccggtgatgaccagcgtggtgtcgcggtcggcggtgatcagcatggcttccagccggcgcagggcgcggtccgaacgccagtccttggccaggtcgaccgcggcgcgggtcaggttgccctggtacttttccagcttggcctcgaagcggtccagcagcgagaaggcatcggcggtgctgccggcaaacccgaccaggaccttgccgttgtagatgcggcgcaccttgcgcgcggtgcccttcatcacgatattgccgagagtgacctgaccatcaccgccgagtgcgacctgattgccgcggcggacgctgacgatggtagtgccgtgatactgttccatggtggcttccgtgaatatgtcaggaccctagttggcgacgcccccggcgggtttcaaggccctcgcctgcaccgggcgcggtctgaccaatataggatgcctgccgccacgttgcccggcgccgcgcccaaacaaaaagggccatgcgttgccgcatggcccttgtccgcgacgcgcggggccactggcccgcgcgcctcgcgcatcactccaccagatcagtccgcatacacgccggccttcttgatcaccggggtccacttgttgatctcggcggtcaggagggtgcgcagcgaatccggcgtggcgcgctgtgccggcgcggcttcggcgcccagctcggccatcttggagcggaaggtcgggtcggccacggccttctgcagcgcagccgacagcttgtcgatcaccggcttgggcgtgcccttgggcgcgtacatggcgtgccagaccttcacttccacgcccggcaggccttgctcggccgccgtcgggatatccttgaacgcttccacgcggcgtgcctgcatggccgcgtacggcttgaccgagttggccttgaggtggcctgcgagattggtggtctggtcgcacagcaggttgacctggccgcccaggatatcggttagtgccggcgcggcgcccttgtacggcacggtggtcagttcggtctggatcgcgctctggaacagcaggccgcacaggtgcgaagccgagccgatgccggcattggccagcgacagcttgctggcgttggccttgaggtacggcagcaggtccttgaaggtgtttggcggcagctgcttgttgccgaccaggatcatcggcacgtcggcgatttcgccgaccatctcgaagtccttgagcggatcgaagcccaggttgcggtacagcgccggggccgtggccatgccgatatggtggatcagcagggtgtggccgtcgttcttggcctgggccaccttcttggcgccgatggtgccgccggcgccgccgaggttctcgatgatcatggtcgcgcccagatgcttggacatgatcgcggtcagctcgcgcgagagcttgtcggtcggaccacccgcggcaaacggcaccaccgccgacaccggcttgccgccaggatattcctgggcgtacgcgcccgacgccacacccattgcgctgactgccagcgcggccgcgaccatctttattactcgtttcatgctctcttctcctgattccctttgatacccgtcttgcaatgcgttgccgccggcccggcccctgcttgtgcggggcgcatctggcgcggtctctgtggcggcgctcttggaccatgccggctggctcggctgcccctgccgtaaaacggcaagggcgggccttgatgttagcaactccagacaatacgcaggtataggggctaacccgcttgcaatcagccgcatatggcgggaaacggggaggatatggcagagatcggatgcaaaggcatgcgtttgtgacacccggtgcggcctaacggaagaaaccgagcatttcctcaagcagaggttcggcggcctcttccgggatgtagtgcccgcacggcagcgcctggccgctgatgtcggtcgccacctcctgccaaagcgccagcggctcgaagcagcgcgccaccacgccgtgctcgccccacagcacgcgcagcggcagcgccagccggcgcccggcctcgcggtcggcgcggtcgtgctccaggtcgatggtggcggcggcgcggtagtcctcgcacatggcatgcacgcgcgccgggtcgcgcatcgccgcggtgtaggcagccatggcgtcgggggcgaagggcgtcaggcccgcgtggcgcaggcccatcagcttctcgatgtagaaatcgggctcggcgttgatcagcgtctcggggaacggcgccggctggatcaggaagaaccagtgccagtaggcggcggcaaaggccatgctggtgcgctcgtacatcgccagcgtgggcgcgatgtccagcagcatggcgcggctgaccgcgtccggatggtccatgcacagccggtgcgcgacgcgggcaccgcggtcgtggccgcacagcgcaaagcgctcgaaaccgaacgccgtcatcagcgacacctggtcctgcgccatggtgcgcttgctgtagtgctcgtggccggcattgccgggcggggccgagctgctgccgtagccgcgcaggtcggtggcgatcaccgtgaagtgatcggccagcgccggcgccacccggtgccagatcaggtggctctgcgggtgcccgtgcaacagcagcagcggcggtcccgaaccgccgcgcacgccggcgatctcgacctcgccgacacgctgccggaagggttcgaagttcgggaacagcagcgcgctggcgtcattcagcatgggtcgtctccgcttctaagggtcgtcctgtgccgatcataggcgcaaaccgcctcatcggcgtggctgcgccggcttcgccattcggccagctgacgcaactgaattgcatcaaccgggggcctatggttaaatccgcccatgacccgtcccagtccggaccggccggccgctgtgccggaaccggcgatccccacccctgagtccctggaagccgcccacgagcgcctgcgccagctgggcgcgcgcgtgacccagccgcggctgtgcatcctggcctgcctgatcggcagcgaagaggcgctgacgcaccaggccgtgatcgaccgcctgcccgaaccgggcgagaccatagaccgcgtcaccgtctaccgcgtgctggactggctggtggaacagggcgtggcgcagaagcgtgccggcaacgaccgcgtgttccgcttcagccttgttgaacacgaggccgcgcgcgcgcaggagcaccgccagcacagccatttccactgcacccgctgcgaccgcaccttctgcctggacgatgccagcgcgccggctccgccggccgcgccgcgcgtgcccagcggctttgccatcgaacatgtcgaactgaccgtaaacggcgtctgcgccgagtgcggcaagcgtgcgcccgcctcgcctggcggcgcttcgcactgaacggcaatctctcatacccggagaacaacaatgtccaaactgaccccggtcacgatcctgaccggctttctcggcagcggcaagaccaccctgctcaagcgcatcctgaacgagcagcacggcatgaagatcgccgtgatcgagaacgagttcggcgaagagaacatcgacaacgagatcctggtgcaggacggccgcgagcagatcgtgcagatgagcaacggctgcatctgctgcaccatccgcggcgatctggtgcaggcgctgtcgacgctgctgacgcgccgcgacgccggcgagatcgacttcgaccgcgtggtgatcgagaccacgggcgtggccaacccgggcccggtggcgcagaccttcttcatggacgaggaaattgcctcgcgctacctgctcgacgcggtgatcacgctggtcgacgccaagcatgcccacctgcagctggacaagcaggaagaggcgcagcgccaggttggctttgccgacgccatcttcatcaccaagtccgacctggtgaccgaagccgacgtggccgagctgcgccaccgcctgctgcacatgaacccgcgcgcgccgatccgtctggtcaacttcggcgaggcgccgatcgacaccatcttcgacctgcgcggcttcaacctgaacgccaagctggagatcgacccggaattcctgcgcgccgacgaccatgaccacgatcatgaccatgagcatgagcatggcgagcattgcggcgacgactgcggccatgaccacgggcacgaccatgcgcacggccatggccacgcgcacgaccaccaccaccaccaccaccaccaccaccataccgaccgcattgcgtcgttcgtcttccgcagcgacaagcccttccactacggcaagctggaggaattcctgtccggcatcctggccgtatacggggaaaaactgctgcgctacaagggcgtactatatatggacggtgtggaccgcaaagtggtgttccagggggtccaccagctgatgggcagcgacatcggcgccaagtgggaggaagagaccccgggcacgcgcatggtgttcatcggcgtggacctgccccgcgacgccatcctcaagggcctggagaactgcctggcctgagtgcaccagtcgccccatcggcgacgccccctcgaaccccgctccgcggccgccccccgttcggggtaccggggaaataccgaagcgccagccggttttccccgtatctcggaaaaatttgttcaagtacaataggccggatttgataccggtggcgcacctttttcccgctgccggcatttggtccatcggatctggtggacttgcagggcggcggttgtcgtcagcatgaggcaggccgccggcaggtgcggtcgcagtgcttcgtgcggagaccgcctttttccgcctggggtgccccgacgcgcgccgtcactgactgacgcgagagagaggtgtccccatgacagccgcaacgaagacgaaagaaagccgcagcaagactggtactgcagcggcagagacgctcaaggcgcagcctgtgaaggcagcgcccgctccccgcggcagtacggcgaacgccgaagcgggcgcaacgaagggaggcccgcgaagcagcaagactgcagccagccagagtgaaacaaccgaggcgcgcaagcgcgcggacagcgcacccgagcggacccggacgccgccggccgcatcaacaagagaatcagcagcaaccatgagcagcaacaaacttctgactgaagctgaaatcctgaagatgagcgacaaggattacatgaacgaagcgcagctcgccttcttcaagcaccgtcttgagcagctgcgcgacgaaatcctgaagaacgctgaccagaccacggaacacctgcgcgaaacggtcatcgtgccggacccggccgaccgtgccaccatcgaggaagagcatgcgctggaactgcgcacgcgcgaccgcgaacgcaagctgctgaagaaggtggagcagtcgctgcagcgcatcgagtccggcgactacggctggtgcgaggaaaccggcgagccgatcggcgtgccgcgcctgctggcccgtcccaccgccacgctgtcgctggaagcgcagcaacgccgcgaactgcgccagaagctgttcggcgactgatacgccgcgcgccggcacggacggtgcggcaggcgtaacgtgacggcccggttacccgggccgtttgctttggcgggccgcgtccgccttgtcgtgccgtcgccacggcctaccattgagaatcgtccggctgttgccgccccggcctttctggtaaattcgcaaccttgttgcaacaacgcgcccctcgcctgggctgcgtagtccctcgtcacttccatctctcctgccatggctgatcgcctgcccgtcaccgtgctgtccggcttccccggcgccggcaaaaccacgctgctgaaccacctgcttgcgcacagcgcgggccggcgcctggccgtgctggtctgcgggccgcagcatgggcaggcgctggcgccgctgccgcccggttgcgaggccacgctgctgcccgtgggcgacgccctgctcggcgaagccgcccggcttgccgccgagggccgctttgactcgctgctgatcgaagccgacggcctggacgagccgctcgcgattgccgaaggcttcctgttcgaggccgagcatggcgccgggcccgacgcggcggtgcaacccgacacgctggtgacggtgatcgatgccgccaccttcctgcgcgacctcaacgaggccgagttcctggccgaccgcgggctggcgccggccacggacgatgaccggaccgtggctgaagtgctggtggcgcaggtcgaatgcagcgacgtgatcgtgctgaacaaggccgacctcgccagcgcggccgaactggcgcggctgcacgccgtgctgcaggcgctgaacccgcgtgccgatatcgtcgaagccagcttcggcaaggtcgcgcccgagcgcgtgcaaggcaccggccgcttcgacttcgaagccgccgcggacgcaccgggctggctcgccgcgctgcgcggcgagttgccggctgccgacgccagcggcgtctccacgctggtctaccgccgccgccgcccgttccacccgcagcgcttcgccgacctgatccataccgaatggctgcgcgagcacggcagcgtgctgcgttccaggggcctgttctggctggccagccgcatggacaccgcgggcgactggaaccagtccggcggcgtctgccgccatggcggcgccggcgcctggtgggccgcgctggatccggccgaatggccggccgacagcgccgaacgcgccgaagtcgaagccgacatgcaggtcgacggtgccccggcagccttcggcgaccgccgccaggaactggtgctgaccggcctggacctggaccatgcggcgctgcaggcccggctcgacgcctgcctgctgaccgatgccgagatggccgcgggcgcggaagcctgggcgggctatgcggatcccttccccgcctgggtcgacgactttgacgacgaccacgatcatgaccatggcgatgattgcggctgcggcgatcccgaccaccaccacggcaaccacgccggccatccgcatgcgcactgactggttcgcccgcctgcgcgcgcatggcccgggcctctggtccgcgctgtggctgacgctatgcctgctgctggcgcagcacgccgggctgacccaccgcatcgtgcatggcagcctgcttgcgccgtcggcctccgtgacaacggccgacgccgcctcggccaacgaccccgagccgcacccgctggcgcagaaattcagcggccactcgtgcgtgctgttcgatggcgccacggttgccgacaccctgtgcggcaagctgccgctgccgcagcttgcctttggcaaaccggtcaagccggccaacctggcctggcgctggcccgacctgcccgccacccaccccttccaatcgcgcgcgccgccggcgcctgccatcgccctcgcctgatccgggaagcggccctcgccgcgcacccggcctgaccaattccgagctgaacgcctgcctattccggctgcgcggccacgcccatcgcgggcggccggcgcagtgccgggcagctgccgtgccagccgggccgattgccattgcctcactccgcgcgccatgtcgaagaatcgttacaccgcaccaaccagcgcaccgcgcctgaccccgctggcggcccttgccgcgtccctcaccgccaccatggcgaccgccttcgtcgcgcccgccgcgctggcacaggccacggcacctgccgccgacagcgcacccgccacggccacggccaccgccaccgccaccgcgccagccggcgccatgctgcgcgaagtcgtggtcaccgccaatccgctcggcagcgacctcaacgacatggtggcaccggtatcgacgctcggcggcgacgccctggccgtacgccagggcagcacgctgggcgacacgctcgacaagctgcccggggtctcgtccagctacttcggccccaatgccagccggccggtgatccgcggcctggacggcgaccgcatcaaggtgctgcagaacggcggcaccaccgtcgacgcctccacgctgtcctacgaccacgcagtgccggtggacccgctcgtggccgagcgcatcgaggtcgtgcgcggcccggcagcgctgatgtacggcggcaacgccatcggcggcgtggtcaacgtgatcgacaaccggattccgaaggagccgatcgaaggcatcggcggcgcggtcgatgccagcgccaccgcgggcggcgaccaggcgcgcaacgccagcgcgctgatcgaggccggcaacggcaagttcgccgtccacgccgacgcctttgcgcgcaagaccagcgacctgcgcatccccggctacgcccgcagcgaccgcctgcgcagcgccgatcctctgccggaaggcgagaccgaagcctatggccgcctgcccaacaccagcgcgcagcaggaaggcggcgcgatgggcggctcctacacctgggccgatggcttcgtcggcgccaactacagcgcctaccgcaatgagtacggcacgcccgccgaggacgacgtgcggctgaaaatgcggcaggaccgctttgcgctggaaggcgaggcacgcaacctggccggcaacaccgccggctggctcgaatcggtcaagggcaagttcggctacaccgactacgaacacaaggagatcgagggcggcgagaccggcacgatcttcaagaaccgcggctgggatgcgcgcctggaggccaggcacgcgaagatcggcaacatgacgggcgtgatcggcacacagttcggccataccgacttctccgcgttgggcgaagaggcattcgtgccgagcaccaatacggataacgcggcgctgttcgtgttcgaggaactgccgctgaccgcttccggcgacctcaagctgaacctgggcgggcgcctggaccacagcagcatcaaggccagcgccaacggcaacgaccgctttaccgatgccagccgcagcttcaacgccaccagcgcgtcggccggcctgctctacaaggtcaacccgctgtggtcgctgaccagcaacctgtcgtacaccgagcgcgcgccgaccttctacgagctgtatgccaacggcccccacgtggccaccggcgcgtgggagctgggcgatcccaatgccaacaaggaacgggccacctctatcgacctgggcgtgcgcttcaagtccggcgcgcacagcgccgccgtgtcgggctactacagccgcttcgccaactacctcgcgctgaacgccaccggccgcacgcgtgacgaggcgggcgatgtggtcgccgccggcagcccggacgcgctgccggagttccagtacctgggtgtgccggccacgctgtacggcttcgaggtggaaggcaagacgcgcttgctgcagaaaatgctgaccaccagcgacacgctggacttcgaggcccgcgccgactacgtgcgcggcgagaaccgcgataccggcgaaccgctgccgcgcctggcaccgctgcgcctgggcggtgcactggtgtatggcgcgggcccgtggggcgcgcgcgtcgacgtgacctacgccgcaaagcagacccgcgtgccgaccaacgacacgccgaccgatgcctatacgctgctgagcctggcgctgacctacaagttcaaggtgtcgggcacgcagacgctggtgtacctgcgcggcgacaacctgaccaaccaggatgcgcgcaactcggcttcgatcctgcgtgatatcgcaccgctggccgggcgcagtgtgaaggtggggttcaggacgtcgttctgaggatgcaggcaggcgtggtgaatcaatcccgattcaccacccactccccctccaccgccagcgccttcactcccgccagcgcgcgcaccgtctgcgcgcagacctcggccatctccagccccggcatgaagcgctggcggatgcgcaccatcagcggcgcggcctccatccatgccaccagcgcgtcctgggccatgcgctgctgctccagcagcttgaacttcaccagcaccttgaccgcatggctggcattgcgcgccgggtcggcgctcaggtaggccaggcgcccctgggcgcgttcgaccgccgccgccacatcggtaaacatccggccatggcccgggatcaccgaccgcgcgtcgagctgcgcgatgcgctccagcaccgccgcctgctcggcgaagccgctctcgccatccagctcggggaagatcacgccgaagccgttctcccacagcgcatcgccggaaaccaggatgcgcccggccggcgcgaacagcatcaccgcgtgcgggtcatggccgggagcggccacgacttgccagtcgatgccacccaggcgcagcgtgtcgccgtcgttcagcacgctgtcgaaggtgaagcggtcgcactgctggccggtggcgttgtagctgagcgcttccgtatcccacgcggcaacggcagcggcctcggccgcggggatcgcggtgcgcggctgccagcgcgcctgcagcgcggcattgccgccgcagtggtcggagtgcagatgggtattgatcacgcgtgcgagcggccggccctgcaaggcggccgccaccagcgccaccgtctgcggcgcgtgggtgacgtagccggtatcgaccagcaccgtatcgtcgccgtccacgaacaggatattgttagccgacagccagccgcgctcgaacacgcgcatggatggcggcaactgcggaaccgggcttgcgctcaaggggatgcctcctcgcctgccagccatgctgcgcgctgcggcagttgcgcccacacgtggcgcttgtcttcgtcgctggccgaggaccagccggcgatttcgtcgatcgtgcgcaggcaacctgcgcagtagccgctgaacgggtccatgtggcaaatgttgcggcatggcgaaggcacaggcgacgcgcgcagcgcgaggtcggcttgcgccgccagttcagccgcggagggggcgggcgtgggcatggtggccatcggacagcgctcagcccgccgcgcgcgcggccttggcggcgaccttctcattgaagcggccggcgtcgatcaggtggcgctcatgcacgccctcggagatcttgtcctcgccgtcccaggcgctcagctggaagcgcaggcggcgcccgtccaccgccaccagttcgcccttgaccgtcaccgtcatgccgggcggcgtcggcgccaggtgcgagaagctgaccagcgtgccgagcgactgctcgcgcggccagtccaggtgttcgcgcagcatctgcaggcaggcacactccatgatgccgaccatatagccggtggccagcacgtcgggcatctcggggcagcccgggatatcgtcgtacaggcgcggcacggtggccttgggcggcaccgtgtattgccagctgaaggtcaggccggggcgcaggtcgggactcatgccactgagcctgccgcgacgtcggccacttcagcgcccgtcatctgctgcaactggtgcggcgtcaggttgaataccgcatggggatgccccgccgcggcccacaagctgtcatagcggaacaggtcctggtccagcagcatcaccggcgccaccgcatgtccgatcgggcagacgccgccgatggcgtagccggtcttctcgcgcacgaagcgcgcgtcggccttgcccagcgcgcctacgcgcgcggccaccttggcctcgtcgacgcggttgctgccgctggcaatcaccagcaccggcgcatcgtcggccacgcgccggaagatgatggacttggcgatctcggccacgctgcagcccagccccgccgcggcctcggccgaggtcttgccggtggccggcagcatcaccacgggccggtcatggccaagcccggccagcaggtccgccacgcgctgcgcggactcgggcagcgcttcgtcattcaccgtcatgcgtacttctccttgttctgtggcccgcgcctgatccgcacttacgcgcaggcaggcgccgcatcgctggcggcggcccacttggtcagcaaggcacggcccacgcgcgagctgttggcgcggccaattgcctgcgagatatagtcgccggtgcgcaccaccgcttccaggtcgatgccggtgtggatgcccatgccgtgcagcatgtacagcacgtcctcggtcgccacgttgccggtcgcgccctttgcgtacgggcagccgcccagccccgccaccgacgcatggaagatcgagatacccacttccaggctggccaggatattggacagcgcctgcccgtaggtatcgtggaaatggcccgacaggcggtccagcgcaaactccgccgccgcggcgcgcatcacttcctgcacgcgcacgggagtgcccacgccgatggtgtcggcaatgtcgatctcgtcgcagcccagttcgcgcatgcgccgcaccacgtcgaccaccgcgtgcaccggtacttcgccctggtacgggcagcccagcgcgcacgagatgctgccgcgcaggcgcacgcccttctccttggctgcggcggccaccggcgcaaagcgcgcgatcgactcggcgatcgagcagttgatgttcttctgcgagaacgcctcgctggcggcgccgaagatcacgacctcgtcggcaccggcctcgatcgcgccttcaaaccccttcatgttcggcgtcagcgccgaaaacagtgtgccgggccggcgctggatgcgcgccatcacgtcggcaccgtcggccatctgcggcacccacttgggcgacacgaacgacgcggcctcgatattgacgaagccggcatcggtcagctggttgatcagcgcgaccttgacctcggtcggcaccatcgccttctcgttctgcaagccgtcgcgcgggccgacttcaacgatcttcacgtagttcggcatggtcatggcagtctcctgtctttgattggtattggtcgggcgctcagtagccgcgctgcacgtcgaccacgcccgcgatcggctggcccgcgcgcagcgcgcggatcttgccggcgatctgcgcgatgctgtcttcgcgcagcgtgagcgccgagatatgcggcgtgacggtgatgcgcggctcctgccagaacgggtgttcggcaggcagcggctcggtgcggaacacgtcgagcgtggcacccgcaacctgccccgactgcaccgcggcgagcaggtcttcctcgaccaggtgctgcccgcgcgcgacgttgatcacatacgcgccctgtgccagccgcgcgaacagcgcggcgttgaggatgttctcggtctgcggtgtcagcggcagcacattgaccagcacgcgcaggccatcgaggaacggcgcctgcccggcatcgccatagaagccgctcacgccttcgatggcgcgcgcggtgcggctccagccacgcaccgggaagccgaagcccgccagcgtgcgggcgatatgcgtgccgagcgtgcccacccccatcacgccgatggtgaaatccgcgcggcgatgcggcttgaggaacttccagttgccggcgcgctgctgggcctcgtaggcgtccatcttgcggaaatagcgcagcacggcgtgggtgacgtactcggccatctgcgcggccatgccggcatcgtcgagccgcacgatcggcacgcccgcgggcaaggcgtcaggggcttcatcgcgcaggcgcaggatgccgtcgacaccggcgcccaggttgaacaccgccttcagctcggtacggccacgcagcatctccaccggcgggcgccagaccacggcgtagtcggccggttcgccacggctgtcctcccacgtcacgcattgcgcttcgggcagtgcctcggcgaatcctgcgatccaggcgtcgtagcggccatcggggacgtacaactgcaacttcattttgtctccaggggaatctggtggggttaaagacgtattttggcagaggaacggacgtggggttggttggggcaacggtgaccgcgcccctgcccctgtcggcatcaagcccccgacttcccctcgaacgccagaagctgcgccccctccacaacctgctccccgacccggtaaagcacctcactcaccaccccgtccaccggtgcgctgatggtgtgctccatcttcatggcctccatcaccagcaacggcgtgccgcgcgtgacggtgctgccagcctcgaccatcacggcaatgaccttcccgggcatcggcgcagtgagcttgccgccttcgctttcggtctcgccggcatgggccaacggatcgagccaggccaggctcacatgccgtccggcatagaagacgtggaaggtctcgccatccgcatgcacctgcccgtgcgcgcgccgggtgccgaggttgatgcggatatcgtcggcctggcaggtgcaggcaaagggcgccgcctggtccgcatagatcagcgtgctgccgcgctcattggtgctcagcgtcacctccagcacctgctcgccatagccgaagcgcagcgtgcgcgacacgccgccgttcagccgccacgcgccgccatgggtccacggcgaatgctggtcggcggcgtcgatgcgacgctcgcgggcctcgcggtcgaacagcgccgccaccgccagcgcgatgacttccaggccgaccggcgccggcggcgggaacaagaccttctcgttgcgctcgatcaggccggtgtcgaggtccgccgtgcggaacgcctgggacgacaccagccgctgcaggaaggccacgttggtcgacaaccccaccacgtgatacgacgccagcgcctggcgcatgcgcgccagcgcctcgtcgcggtccttgccccagacgatcagcttggcgatcatcgggtcgtagaacgggctgatggtgtcgccttcgcgcacgccggcgtcgatgcggatgccggccgggccgtgcacatcctcaccgcgcatgaactgcaccgccggcggcgtgcgcaggaagcgcagcgtgccggttgatggcaggaactgcttgtcggggttctcggcgtagatgcgtgcttccagggcgtggccgtcgatgcgcagctggtcctgcgtgagcggcagcgcttcgccggcggcgacgcgcagctgccattcgaccaggtcctgcccggtgatcatctcggtaacagggtgctccacctgcaggcgcgtgttcatctccatgaagtagaacgaaccgtcctggttggcgatgaactccaccgtgccggcgccgacatagccgaccgccttggccgcggccaccgccgcttcgcccatggcgcggcgacgcgcctcggtcatgcctggcgcgggggcttcttccagcaccttctggtggcggcgctgcaccgagcagtcgcgctcgaacaggtagacgcagttgccatgggtatcggcaaacacctggatctcgatatggcgcgggcgcgtcaggtacttctccaccagtaccttgtcatcgccaaagctggcgctggcctcgcgcttgaccgaggccagcgcggcctcgaaggcgtcgcccgactcgaccacgcgcatgcccttgccgccgccgcctgcgctggccttgagcagcaccgggtagccgatgcggtcggcctcgcggcgcagcagcgccggaccctggtcctcgccgtggtagccgggcaccagcggcaccgcggccttctccatcaattgcttggccgcgctcttgctgcccatcgcgtggatggcggacgccggcgggccgatgaagaccagccccgccgcggcgcaggcctcggcaaaggcttcgttctcggacaggaagccgtagcccgggtggatggcctgggcgccggcctccttcgccatctcgatgatgtggtccgcgcgcaggtagctgtcgcgcgcggccgcgccgccgatatgcacggcctcgtcgcagaaggcgacgtggcgcgcgtcggcgtcggcatccgagtacaccgcgacggtgcggatgccgagccggcggcaggtggcggccacgcggcaggcgatttcaccgcggttggcgatcaggatcttgctgaacatggctcctcctagtttttcgacaggacggcgagccagctgattaccggtgggcttccttacctcgtcatcccgcgtagccctctgcgcggatgtcgaggcgggccagcagggcgcgatcgcggtcggcctgcgggttgccggtggtcagcagcttttcgccgtaaaaaatggaattggcgccggccatgaagcacagcgcctgcaacgcttcgtccatggcctcgcggccggcggacaggcgcaccatggcgcgcggcatggtgatgcgtgccacggcaatggtgcggacgaactcgaacgggtccagcgcctcggtgcccgccagtggcgtgccttcgacctggaccaggttgttgatgggcaccgactccggatacgggtccatattggccagctgcgcgatcaggccggcgcgcgcttcgcgcgcctcgcccatgccgacgatgccgccgcagcagacattgatgccggcgtcgcgcacatggccgatggtgtcgagccggtcctggtaggtgcgcgtggtgatgatcttgccgtagaactcaggcgaggtatccagattgtggttgtagtagtccagccccgcctccttgagctgctgggcctgctcggccttgagcatgcccagcgtgacgcaggtctccaggcccatggccttgacttcgcgcaccatgtccatcaccggctccaggtggcggtccttggggctgcgccaggcggcgcccatgcagaagcgggtggcgccattggccttggccgcgcgcgcggcgtccaggacttcgtccagcgccatcagcttttcggccttcacgccggcatcgtggtgcgcgctctgcgggcagtagccgcaatcctcttcgcagccgccggtcttgatcgacagcagcgtggacagctgcacggtattggcgtcgaagtgctcgcggtgcacttgctgggcgcggaacagcaggtcgttgaacggcagcgcgaacagcgcggcaacgtcatcgacgcgccacgcggcgtcatcgggcagtgcgtgcgagcgcgcgctctggcgcagggaatcgacggaaacggtagtaacggtggtagcggtgtgagcttgagtcatgatcgatgcgaattctggttcaggcagcaaggccggcggcctcggcttggtattgggtagcggcggcgaacagcggcgcaaggtcgagccggccagcggcagcggcgggcgccagttgccagggcaattcaccgaggcaaggcgcgtccagcgacgcgtgcagcgtggcgatgttctcgtcggccagcagcatgtccgggtcgacccggttggcgatccagcccgccagcggcaggccgcgcgcgcggatggcttcggcggtcagcacggcgtggttcaggcagccgagccggatgccgaccaccatcactaccgggaccgccagcatcaccgccaggtcggcggtgttccagcgcaccgcgcctgcgtcgagcggcacattgaagccgcccacgccctctaccaccaccgcatcggcctgccggcgcagcgcgtcgaaggcggcacggaccggcgcgcgcgtgatgcgcacgccctcgtgcgcggcggccaggtgcggcgagcacggggtgcgcagcaggaacgggcaggtctggcccagcggcaccgccaccgagctggcggcgcgcagctgcgccacgtcgtcgttgtgccaatggccgtcgcgccactcactgccgctggccacgggcttcatgcccgcggtgcggtagccggcggcatggagcgcatgcagcagcgtggcgctggcgtgggttttgccgatgccggtatcggtgccggtgacaaagcaggcgaaaggcgcacgcgtgctcatgcgacctcccgctgcgccacggcggcgctcagggcatccagcaggcgccgcacatcgtcttcggtgtgcgcggccgacagcgtgatgcgcagccgcgcggtcccttccggcacggtcggcggccggatcgcgccgacgcggatgccatccgcctccagcgtggccgacagcgccagcgcggcgccgttgtcgccgacgatcagcggctggatcgcggtctcgctgtcgcccagcgtccagcccgcgatggcagccagctgggccagcccctcgcgcagcatgccgatgcagcgcgtcagttgcgcgcggcgttgcgtgccctcctctccttcgatgatcgccaggctggccagcagcgcatgcgcgactgccggcggcgcggccgtggtgtagatatacggccgcgcggtgttgaccaggtgttcgatgatggtctcgtgcgcggcgacgaaggcgcccgccacgccggcggccttgccgagcgtgccgatatagatcagccgctcggacgacagccccagcgcttccagcacgccgtggccctgctcgcccagcacgccgaagccgtgggcgtcatcgacaatgatccaggcgtcatggcgctcggccagttccagcagcttgcgcagcggcgcgacattgccgtccatgctgaacacgctgtcggtcacgatcagcttgcgctcgctggtgctggccgccagcagcgcttccagcgcggcggtgtcgcaatgcgggtagcgctgcacgtcggcgcgcgcgagccgcgccccatcgatcagcgaggcatggttgagcgactcgcagaacagcgtggcgcccgcggtgcccagcgcggtcagcaccgccatgttggccatgtagccggtgcagaaatacagcgtgcacgcatgcgggatatgcggggcgagccagcgcgccagttccgcttccagctgggtgtgcgccagcgaatgcccgctgaccaggtgcgaggcaccgctgcccgcaccatagcgctgcgcgccttccaccagcgcggcgatcacgtccgggtggttggccagccccatgtagtcgttgctgcagaaggtcagcagcgattccggctcggacccgtcctcgcccacggcctggtgcggcgcgcaggcagtgtgggcaacgcggcggcggcgcgtcagggccagcgcgtggcgctgttcggcggcccgcctcagttgttcaagcagcatggcgcacctccccgctcgtggtcacatcggtggtcacatcgtcgagcgtggccatcatctgctcgcccagccagcgtgcctgcgcggcatcgaagacgtagggcggcatcacgtacagcgtattgccgatcgggcgcaccagcagctcgcgctcgcgcgcggcgtgatggaagcgcgcggcaaagtcggcgccggcgacgtcatcgcgcacatcggcggcccagatcagcccgcgctggcggacgtgccgcaggcgcgcgtcggcggccagcgcggccatgccgtcggcgagccagtgcgcgcgctcgcggttgcgcgcgagcacgtcgtcctgcgcgaacaagtccagcgtggccagcgcggcgcggcaggccagcgggttgccggtgtaggagtgcgaatgcaggaagctgcgggccagctcgtcggcgacgaaggcacgctggatctccgggcgcgacagcaccagcgacagcggcaggtagccgccgctgatgcccttggacaggcacaggaagtcgggccacaggtgcgcgggcagcggcgcctccccggcgcgcgactgttcccacgcgaagaaggtgccggtgcgcccgcagcccaccgcgatctcgtcggcgatcaggtggatccggtagcggtcgcacaaagcgcgcgcgccatccagatacgacgggtcgtacatcgccatgccggcggcgccctgcaccagcggctcgacgatcagcgcggcgatctggccggcgcgctcgcgcagcagggtttccagctccgccagggcgcgggcggccacgtccgcagcgctctcgccgggtgcggcctggcgtgcgtcgggcgacatcaccacgtgtgcgcggcggatcagcggatcataggcatcgcggaagacttccacgtcggtcaccgcgagcgcgcccacggtctcgccgtggtagccgtggcgcaggcagacgaactcgcgcttggcaggcaggccggtattgcgccagtagtggaagctcatcttcagcgcgatctcgaccgccgaggcgccgtccgaagcgtagaagacattgccgagcgcgccgccggtcagcgccgacaggcgctccgccagctccaccgccggggcatgggtgcagccggcgagcatcacgtgctcaagcgtttccagctggctggccagcgcggcgttgatgcgcgggttggcgtggccgaacaggttgacccaccacgaactggtggcgtcgaaatagcggcggccgtcggcatcatgcagccacgggccgacgccgcgcacgatcgccagcggcaccgcgtcgtcgtcggggcgcagccgcgtgcatggatgccagacggcgttgcggctgcgctggccgagtgcctgcgcgtctctgcctggggaaagggacaggtgatccaaggtagccctcctttgttgaccgtccgcgcgcgcgccgttgccggcaaggccgggctgtgcgacggtggcggacaggttggggagggtcatgttaggaatgtctctttcaggttggcaatgacaatggaatttccaagttagcggcgcgttagcgaaacttgatgaatgtttccatgacgaagccttgttcttgttgctagcgtgctgcgatctacacgcaatctttatttacggaggcatgctgtcgcatgctgctacggaactcccctctcccgcctgcgggagaggggtggggggagagggcaggccttcccacgaagtcaggcgcctcatgcttggcataagcccgccctctcccccagcccctctcccgcgcgcggaagaggggagcaaacaagcggtaagccagtcttttgcctcaagccggccgccacgacggcgagcgcttctccaggaacgacttcaccccttcacgcccctcttccgacgcccggatctttgcaatccggtccgcggtatcggccagcaagtcgttgtcgatcgcgcgcccggcgatgtcctgcaccagtcgcttgctttcgcgcacggcgttcgggctgttggccaccagcgcagtcgccagttcggcgaccttggcgtccagagcctcggccggcaccaccgcatgcacaaagcccagccgcagcgcctcggcggcatcgaagcgctcggcggtgatgaagtagcggcgtgcggcctgctcgcccagcgcgcggatcacatacgggctgatggtggcaggcagcagtcccaggcgcgcctcggacaggcagaagtgcgcgtgctcggcagccaccgcgatatcgcacgcggccaccaggcccatgccgccggcgtaggtgtcgccctggatgcgcgcgatcaccgggcgcgggcacgaccagatggtgtgcagcatctgcgccagggtcagcgcatcggcgcggttctggtcgtcggaatagccggccatcttcttcatccaattcaggtcggcgccggcgcagaaggcagggccgttgccggccagcacgatggcgcgcacctcgtccatgtcgcccagcgcgcggaaggcgccggtcagctcggcgatcacggtctcgttgaaggcgttgcgcacatcgggccggttcagcgtgacggtggcgacgtggctggcgatattgacggtcagggcggtgaattccatggttcgctccgttggcggattaagttgtctggtgcggttcaggtcccggcgtcgaacggcagccccagcgagcggaagaagttgccgacttcgggcaaccacaccgggatgccttcgcgcgcgctgaagacgcgatgcgagtcgttgccgaactcgcccacgtccaccagccgcgatctggccgcgggaccggtggcgcgcgccttgaaggcgttgaacatgcggccgggcaagggcaccggccagtagctgtcgttgtcgccgtacacccacagcgacgggtagcgcgccaggccgccatagctggcaaaggcatcgaccaggcgctcttcccagtccgcgcagttcaggttgcgcagcccgcccgcgaagttgaccacgcccagcacccccggatagccgatggtgctgaacgccatcgtggtcaggcccccgtgcgactggccgatcacgacaatgcggtccatgtccacatagggctgcgtggccatgaagtcgagcgtggcgacgacatcgtcggcctgcatcatgccgttggtctcgatgtcgcagctgccgcccacataggcgccacccgagcgcgcaaaaccctgccgcatcggcagcaccacggcgtagccgcggcgcaggaattccaggctctgcgccggaaagcgcgcgcgcccctgcatcgcgggccggcccggcgccttgccgtggttgatcaccaccagcgggaacggcccatcgccagccggcttgaataccgtggcctccaggtcgatgcgcgacgggatcgccgccttgggcagcatcaccacctgctcctggaagcgcatgcgcggcgcaggattgccgttgccgctcgcgctctgcgcatgccccgacagcggcgccagcaaggcaagcgccgtgaccagggctgggctgcaaagcaggcgggcgacgctgcgcatggggtggaaggcggtaatgtgacagtagcggcgtggccgggattacatgcggaacacgccgaacttcatctcgtcgatcggtgcgttcaggctcgcggaaagacccaggcccagcacggtgcgggtctgcgccgggtcgatcacgccgtcgtcccacagccgcgcgctggcgtagtacggatggccctggtgctcgtactggtcgcggatcggctgcttgaacgcctcttcctcttgcgcgctccacttgccgcccttgccctcgatgccgtcgcggcgcaccgtggccagcacgctggcggcctgctcgccacccatcaccgagatgcgcgcgttcggccacatccacaggaagcgcggcgaataggcgcgcccgcacatgccgtagttgccggcgccgaacgagccgccgatgatcaccgtgaacttgggcacctgcgcggtggcgaccgcggtcaccatcttggcgccattgcgggcaatgccttcgttctcgtacttgcggcccaccatgaagccggtgatgttctgcagaaacaccagggggatcttgcgctgacagcacagctcgataaagtgcgcgcccttcagtgcggattcggagaacaggatgccgttgttggcgacgatgccgacggggtagccccagatgcgcgcgaagccgcacaccagcgtggtgccgtagcgcgccttgaactcgtcgaactcggagccgtcgaccaggcgcgcgatcacctcgcgcacgtcgtagggcttgcgcgtgtcggtcgggatcacgccgtacagttcttccaccgggtagagcggctcgaccggctcgtgcaggcggatctggtccggcttgcggcggttcaggtgctgcacgatattgcgcgccagcgacagcgcgtggtggtcgttctgcgcgaagtagtcggccacgcccgacaggcgcgtatgcacgtcggcgccgcccaggtcttcggcgctgacctcctcgccggtggcggccttcaccagcggcgggccgcccaggaagatggtgccttggttcttgacgatgatggactcgtcgctcatcgcgggcacgtaggcgccgccggcggtgcacgagcccatcaccaccgcgatctgcgggatgccctgcttggacaggttggcctggttgtagaagatgcggccgaagtggtcgcggtcggggaacacgtcgtcctggttgggcaggttggcgccgccggaatcgaccaggtagatgcagggcaggttgttctgctctgcgatctcctgtgcgcgcacatgcttcttgaccgtcatcgggtagtaggtgccgcccttgacggtggcgtcattgcagacgatcacgcactcctgcccggccacgcggccgatgccggtgatgatgcccgcgcccggtgcggcattgtcgtacatgtcgtacgcggccagctgcgacagctccaggaacggggtgcccggatccagcagttgctgtacgcggtcgcgcggcagcagcttgccgcgcgacaggtgcttgttgcgcgcgtcgtcgccgccgccttcggccagcttcgcgatcctggccttgaggtcggccaccagggcctgcatcgactcggcgttggcctggaaggattcggagcgggcgttgagtttggtttccagggtgggcatctgtgtctcttcctgcttgatattggttttcgccgtcctgccagcggccgggctcagcctgcgtgcctgggcagcgggtgccccggcatcaggtcgtaggggtgcttccagcccggcagcgcacggatgcgctcggcccaggcgtggatatgcggatactccttgcgccagtgcacgccgatctcgtcgtcgaagaagacgtagcccgacagcgagaagtccgcgatggtggcgcgctcgcccagcaggaacgctcgcccggccagttgcgcgttgagcacgttccacgcgccttcgcagcgcgcgcggaagaactccagcacggccgggtccggcgacctggcaaaggtgcgcatgaagcgataggtggcggtgtaggaggtgaacttgtggttgtcgaacagcagccagcgcagcacctcggcgcgctcggcctcgtcgcgcgggccgtaggcatcgaggcgcgtggccagcgtttccaggatggcaccggactgcgacaggcgctggccgccgcactccagcaccggcacctcgcccatcacgttgatggcgcggtattcgggcgtgcgggtctcgccgttgaagaaatcgacgaagcgcggctgccacagctgctggccgcgctgcacgccgacggtctccagcagcagcgccaccttgtaggcattgccggactgggcaaagcaatacagcaggtactccggctcattccgcttctcgatgctcatgatgtctccccgatcatgtcgccatccacatagagccagcgcggtgcctcgccaggcgcgcgcggctcgcgtacaaagcggctgcgttcgtgcagccgcatggcgcgcccgcctaccttgtagcgcgccacgaactccacttcggcatgcgcatcgtcctgctgcgcatgcgccttcaccgtgagcccgagccagcgcgtggcggtatccggcaacaggtcggccgggcaggtcgatgcatgccaggtctgccgcaaccattccatgtcgttcagcacataggcgctgtagcgggagcgcatcagtgcctcggcattgggcggcagtgcctcgccacgatggaagcggccgcagcaggcggcatagtccgcgctgccgcacgggcacggcaccggtccggccttgggcaggcggcctgccgctttcgcggtcatcccaccagctccggcaggtcgcgcatatcggtgaagatggtgcccgcgccggcctcgcgcagcagcgcggcatcgttgcgctcggcgtagccgaacaccgtcatgccggcggcaacgcccgcggtcacgccggtcgggctgtcttccaccacggcgcagcgcgccggctcaacgcccatggtgcgcgcggccagcaggtacacatcgggcgcgggcttgctgcgtgccacttcggtggcggagaagatatgctcgcgctcatcctgctggaacagctcgaccaggccggtcctggtcagttgcagcttgaccttgacgcggtccgcacccgacgccacgcacaccggcatgccggtggcggcgatcttgccaatcgcctcgcgcacatgggcgaccgcagcgacttcggcttccagcaccgcgttgcggcgcgccagccaggtcgacagccagttctcgggcagcggcgcgccgcgcatgcgctcgatcatctccagctcttcgcgcacggcgcggccgagaaacaggcgcgtggagtcttccagcgagatctcgatgccaagctcgttcagcatctggttgagcacgcggttgacgatgggctcgctgtcgacgagcacgccgtcgcagtcgaagatcacgcaatcgaatcggccggaatggccacgggttgctgcagtcatgcgggtttcttttccttggtgtccaggctcggcacagcccggagttcagtctggcggcggctcttcaggtgggcctcgacctggtcgaagcggtcgaagccccagaacggctcgccatcgatgatgacgaagggcgagccgaacacgcccttggccatcgccacgtcgatctcggccttgagctggtccttgatctggtagctggtggcgccggcatccagcgcctgcacgtccacgcccagcggctcggccagcttcatgatctcggccggctcggcgatattgatgtcgtcgacgaacagcgcgcggtacaccgacttggcaaaggccgcggcgatgtcatcgccgtggtggttctgcagccacagcatggcacgcgcggcgtgcgtggtgggcagcgggaaatgcgtggggcgcttgtactcgatgccgtggaagcgcgcggtgcgctcgaaatcgcgccacgaataatcgcccttgagcggcagctgcggcagcggcgaggcgccggtggtcttgaacaccacgcccagcaggatgggatgccaggcgacgatgcgcccgtacttctgcgccaggtcgtcgatgcgggtactggcaaagtagccgtagggcgaagagaaatcaaagtagaagtcgatcgctgcggtcatgtcggggcccttcttgttgtggttgccggtacggggatcagggaagcgcgccgccttcgcggcacacaccccatcgtacgcgcatcgctaggccagcgcgcgcgcgatcaggatcttctggatatcgctggtgccctcgtagatctggcacacgcgcacgtcgcggtagatgcgctccaccgggaagtcgctgacgtagccgtagccgccgaacacctggatcgcatccgagcacacccgctcggccatctcgctggcaaagagcttggccatggccgcttccttcaggcacgggcggccggcgtcgcgcagcgcggcggcgtgccacaccatctggcgcgccacgtcgatgcgggtggccatctcggccaggcggaactgcaccgcctggtgctggaacagcggctggccgaagctctcgcgctccttggcataggccagcgccgcctcgaacgcggcgcgcgccatgccgatgctctgcgaggcgatgccgatgcgcccgccttccagtcccgacagcgccatcttgtagccgccgccctcgtcgccgagcaggttggccgccggcacgcggcagtcctcgaacaggatctgcgcggtgtccgacgaatgctggccgagcttgtcctccagccgcgccaccacgtagcccggggtcgaagtcggcacgataaaggcgctgatgccgcgcttgcctgcggccttgtcggtcacggccagcacgatcgccacgtcggcgttctggccgctggtgatgaactgcttgacgccgttgagcacgtagtggtcgccatcgcgtaccgcagtggtacgcagcgccgacgcatccgagcccacgtgcggctcggtcaggcagaacgcgcccagcatctcgccgcgcgccagcggcaccagccactgctgcttctgcgcctcgctggcgaacgacatcagcatgctgcacaccgggcagttgttgacgctgatgacggtggaggtgccgccatcgccggccgcgatctcttccaggatcagcgccagcgacaggtagtccagtccggcgccgccgtatgcctccggcaccgccacgccgtaggcgcccagcgccgccagttcgcggtgcacgtccttggggaaggtcttgtcgcggtcccactgcgcggcctgcggcgcgatcacttcctgcgcgaactggcgcacggcgtcgcggatcatttcctgttcgggggtcagcagcatgtcggttcgatgctcagtgtgcgtgcgcgcttaccaggggatgggcgtgccgtcgtaattgtggaaggtgccgttgtcgcgccgcttgacgccggcgagcaactggcgcatgcccttgacgctctgctgcacggtcaggtcggcttcctggccgcccatgtcggtcttgacccagcccgggtgcagcgcgacgcaggtggcgtggcgcgcatcgagcgagaccgcgcgcagcgccgcattggcgccggccttgctgacgcggtacagccagctggtgctgtgctccatcgcggtgatgctgcccatgcgcgaggacagcaccgccagcacgccgccgtggccggactggcccgcttcgacgtagggcagcagcagcggcagcgccatcatcgggcccagcacgttgacatgcatcacccggtcgaattcctgcggcgtgaccggttgcgcgccttcggtgcggggtcccagcacgccggcgttgtagatcgccacgtcgagggcttcgccgtcgagcttccagcccaggcccgcgaccgcgccggcatcggacaggtcgacctgatgggcttcggcgcccagcgcctgcaatgcgccgacgccttcaggcgtacgcgccgccgcaatgacgcgccagccgtcggcacggtactggcgcacgaattcaaggccgatgccgcgcgaggcaccgaggatcaggacggttggcaaggctgtgctcctttgtcgggctggccggagcgcgaaacggctcgcccggccacgggttcagcaaactgcctctgtcttgctccctctcccgcaagcgggagaggggagaaaacaagcgggaaggaacgcgttacaggatctcgatccccaccgcagtcgcctcgccaccaccaatgcacaggctcgccaccccacgcttgcccccggtcttgcgcagcgcgccgatcagcgtggtcatgatgcgtgcgcccgaagcgccgatcgggtggcccagtgcgcaggcgccaccatggatattgaccttgtcacgcgggatcttgaggtcgtgcatggccgccatcggcaccacggcgaaggcctcgttgatctcgaacaggtcgacgctgtcggtggtccagtccagcttgcggtacagcttggaaatcgcttccaccggcgcggtggtgaaccagcccggcgcctgcgcgtgggtggtgtggccgagcatgcgcgcgatcggctgcaggcccagcttcttcgcggtggaggcgcgcatcatcaccagcgccgaggcgccgtcgttgatggacgacgacgaggccgccgtgatggtgccgtccttggcaaacgcgggcttgagcgaggggatcttgtccagcttgatgcggcgcgggccttcgtcggtgtcgatcacggtgtcgccgcccctgccggacaccgtcaccggcgcgatctcccagcggaagtcgccgttctcggtggcctgctgggcgcggcgcacgctttccatcgcgaattcgtcctgctgctcgcgcgtaaagccgtacttggcggcgcagtcctcaccgaaggtgcccatggcgcggcccttgtcatacgcgtcttccaggccgtccagcatcatgtggtcgtagatcatgccgtggccgatgcggtagccgccgcggcccttcggcaccaggtacggcgcattggtcatgctctccatgccgccggcaatggcgatatcgaacgagcccgcgatcagcccgtcgtagacggtcatggccgcgcgcatgcccgagccgcacatcttgttgacggtggtgcagcccacgcccagcggcaggcccgcgcccagcgcggcctggcgcgccggggcctggccctggccggccggcagcacgcagccgaacaccacctcttccacctgctcgggcttcaggccggcgcgctctacggcggcgcggatggccacggcgcccagctgcggcgcggtgacgctggcgaattcgccctggaacgcagccatcggcgtgcgggcggctgaaacgatgacgatctcttccatgtcgggtctcctggatcggtggatgaagaagcggtgtgtgcgtccggtcagcggatcgacgcctgcggcggatcgccgtactggcggtaggccgcggccagttgctcgcgcagttcgtcgttgctgctggcggccatgcccaggtcgcgcagcaggccgtcggacacgccgtagacccagccatgcacggtcaccgcctggccgcggctccaggcgtcctggagcacggtggtctggcagacgttgttgacctgctcgatcacattgagctcgcacagccgggtatgggcatcgtcttcgcgcagcagcgtgccgagataggcctcgtgcttgtcggccacgtcgcgcacatggcgcagccagttgtcggccaggccgatgcgctcgcgcttgagcgcgaccttgacaccgccgcagccgtagtggcccaccacggtgatatggcgcaccttgagcacctctaccgcgaactggatcaccgccagcgcgttcaggtcgctgtgcgcgatcacgttggcgatattgcggtggacgaacacctcgcccggggccaggcccagaatctggttggccggcacgcgcgaatcggagcagccgatccacaggtactcgggcgcctgctggttggccaggcgcatgaagaaggtggggtcttcggcgttgacgcggtcgacccactcgcggttgttgcggaacagctgggcgatggcgtcagtcatgcgaccctccttgcaggaccaggatcgggaacggcagcggtaccctgcgcgctgccagcttcgctgtagcggtgaatgaatcgctctgaactgtgataggcaaagaagtcatgaacatgtccggccagcagccggtccttgtggctctgccacatggcagggtcgaaaaagtccgcatggtggcgcaggaacgccgcgcgcacgcgcgtgtcgcccagcaggaaggtgcggaaggtctcgggaaagatgtcgtgcggacgcaccgtgtaccagacctcgcccgacatctcctcttcctcgttgcgcggctgcggcacgtcgcggatgttgcagtcggtcaggtactcgatctcgtcgtagtcgtagaacaccacgcgcccgtggcgcgtgacgccgaagttcttgtacagcatgtctcccggaaagatgttcgcagcgatcagctccttgacggcgttgccgtattcaatcacgccgtgctcgacctgctcgtcagtgccctccgtcaggtagatgttcagcggcgtcatgcggcgctcgatatagacgtggcgcaccacgatctcttcgccgccatccttgccgcgctggtactcgatcatcgacggcgcgtgctgctcgaactcgcgcaccagcgcctcgtcgaagcgcgagagcgggaaggccacgtcggaatactccagcgtatcggccatgcggccgacgcggtcgtgctgcttgaccagctggtacttggacttgaccagctcgcgcgtggtttccttgggcgccgggaaaaagtccttgatgaccttgaacacgtacgggtacgacggcagcgtgaacaccagcatcaccagcccgcggatgccgggcgcgacgatgaacttgtccgacgaatgctgcaggtggtgcaggaagtcgcggtagaacaggttcttgccctgcttctgcaggcccagcgaggtatagatctcggcgcgcggcttgcgcggcatgatgtcgcgcaggaaggtcacgtaggccgacgggatctccatgtcgaccatgaaataggagtgcgtgaacgagaacaggatcagcaactgttccttcttcagcagcacggtgtccagcgtcagcttgcccgaggggccgtgcacgatcgggatcgccagcgggaaagtgcggtcgccgttcaggatgcggccgatgataaaggccgacttgttgcggaagaacagcgacgacagcgtatggacctggaaattcggcgcgatgcgcaggtcgccgaaatgctcgctgaccgcgcgcaccacgtagccgatgtcgcgctgcaggtcctcgaacgggctctccagctggaagttgtgcacgacgcgctcgaagcacgcggccatgccctcgcggctgcccgggtagtaggcgcggaaggtggggcgcgtgggcgattcctcgttctcgatgtactcggtcgagatcgccgggcgcacgaagatgaaatcgttgttgaagtacgagcggtgcaggatgcgcgtgcagaccgagttgaagaaggtctcggccagctcgggctggtggtggttggtcagcaggccgatgtagtgcagcttgatctgctgccagatctcgtcctcgatgttctcggcgtcgtactcgtcttccaggatcacgctcgattcgcgcacgcgctcgttgtagaacgcaatgcggtcgcgctggatctgctgcagcccgtgccagtcgccggcctcgaacttgagcttggcctggtggctgacctcgcggaacaggcggtaatgcttgtcgaacccgtcgagcatcgttctcgccacatcgaaggcaatctgcgaggagagcagtttggggaagtgggacatgggtcgacgggggccgggagaaatgtgcggcgagcggtcttgcgacgggtactgagattgtaatggggttcgggcgggggctccgggtgatttcggcgccccccttgcgctttacatggtttcggcgaacagctcgcggccgatcagcatgcggcggatttccgaggtgccggcgccgatctcgtacagcttggcgtcgcgccacaggcggccggccgggtattcattgatatagccgttgccgcccaggatctgcacggtctcgcccgccatccaggtggccttctcggcggtgtacaggatcaccgcggcgcagtccttgcgcacctggcgcacgtgcccgctgcccagcgcgtccaggttcttgccgaccgtgtacaggtagctgcgcgcggcctgcagcgtggtgtacatgtcggccaccttgccctggatcagctggaattcgccgatgctctggccgaactgcttgcggtcgtggatatacggcgtgaccacgtccatgcacgcctgcatgatcccgaccgggccgccggacagcaccgcgcgctcgtagtccagcccgctcatcagcaccttggcgccgccgttctcggcgccaaggatgttctcgaccggcacttccacgtcctggaacaccagttcgccggtgtgcgagccgcgcatgcccagcttgtccagcttctgcgccaccgagaagcccttcatgcccttttcgacgataaaggcggtcatgccgcgcgcgcccagctcaggctcggtcttggcatagaccaccagcacgtcgcagtccgggccgttggtgatccacatcttggtgccgttgagcacgtagcggtcgcccttgaactcggcgcgcagcttcatgctgaccacgtcggagccggcattgggctcgctcatggccagcgcgccgatccattcgcccgagaccagcttgggcaggtacttcgccttctgcgccggcgtgccgttgcggtggatctggttcacgcacaggttggaatgcgcgccgtacgacaggccgaccgacgccgaggcgcggctgatttcttccatcgcaatcatgtgcgccaggtagcccatgttggcgccgccgtattcctcggccacggtaatgcccagcacgcccaggtcgcccatcttcttccaggcgtccatcgggaactggtcggtgcggtcgatctcgccggcgcgcggggccagctcggcctgggcccagtcgcgcacggagttgcgcagcatctcgatgtcttcgcccagatcgaatttcaggcctggcagttcggtcatgatggtctcctgtttggaatcggtatgtgtgtcgggttccggatggatggccggagccgtcagttcagacgtggcccagtgtcttgaccacgcacagcgtcatcagcatggtggccacctgcttgcggcggctgtcctgctcgacatagacatcgccctgtgccacgatcagcgtgcgcccgggcttgaggacccgccccaccgccaccaggcgttcgccctgggcgggagacagcaggttgatcttgtactcggcggtcaggcccgcctcatcttcgcccaccatcgtcagcgcggcgtagccgcaggcgctgtctgccagcgcacccaccacgccgccgtggaagaagccgtgctgctgggtcacgccgtcggaccacggcatggccagctcgacctcgccgcggtccacccgccgcagggtcgcgccaaaggtggtcatcagcccctggcgggaaaagctggtggcgatagcgtcggcgcgcgcggcggacagcgatcctggttcagcgggtacggcactggcgttggatgacgtcatggcggagttccggtgtgagaacgttgggtcgccggcagcaacaggctgcgcgcgctgtcggggtattctattgacgtttacgtaaacgtcaatcccatccggcacggatgccggtggaagtgccgcttcaggcgaccgaggtccgggccggcgcatcgccgtcttccgtggccggttgctgcttgccggtctgcgcggccagcaaagccctgcactggcgctcatgctggtcgatctcggccagttgcgcctgcaggtcttccatctgccgctcaagcgtgcgccggtgcgccgcgagcgagtgcaggaagcgctccagctgcggggctgtgtcgcgtggtgactcgtagaggtcaaggatctcgcggatctcattgagagtaagccccaacctcttgccgcgcagtgtcagcttcagccgggtccgttcacggccgttgtagacccgcttgcgcccgcccggcccttcgcgctccggcgacagcagaccctggtcctcgtagaaacggatggcccggggcgtgatgtcgaattcacgcgcaaggtcggtgatggtgtaggtggcggaagccgccgctggcgtcgctgacatagcctgcccaaagaaagtgaacggtcgttcgttgtgaagtcaagttttcgcttaagatggaaacgaacccgtatgattgacgtttacgttagcgtcaaccagatcggctggcaaccggtgcttgcacgccctgctcaatgcttggcgtgccggcagaacgagaaagcccgcgcccccgcgccaggcttcgaccacgagactcctcatgaacgcactcgaacaccagctccaatacccgttcggcgacaccatgcccgagcccggctccaggcaggaagtcgcccccggcgtctactggctgcgcatgccgctgccgttcgcgctcgaccatatcaacctgtggctgctgcgcgaccgcctggacggccgcgacggctggaccatcatcgactgcggcatcaccaacgacatcatcaagggccactgggaaaccatcttcgccaatgagctggaaggactgccggtggtgcgcgtgctggtgacgcacagccaccccgaccacgtcggcctggcgcactggctgtgcaagcgcttcggcgtgcggctgtggatgagcctgggcgactacatgagcgcgcgcgtgatgggcagcggcaccggtgccggctccagcgcgggcggcgacgccgccgccgcgcacttcgcgctgcacggcctgaccgatgccgacagccaggaaaagctgcgcgcgcgcaagacctactacccgtcgctggtgccggagctgccggcgcagtaccgccgcatgatggagggcgacacggtgcggatcggcaccgatgcggcgacctcggcctggcgcgtgatcaccggcttcggccattcgcccgagcatgtggcactgtacaacgccgccaccaatgtgctgatctccggcgacatggtgctgccgcgcatctcgaccaatgtcagcgtgttcgacatggagcccgaaggcaattcgctgcagctctacctggattcgctcggcaagtacgaaccgctgccgcaggacgtgctgatcctgccctcgcatggccgccccttccgcaacctgcatacccgcatcatgcagctgcgcgagcaccatgccgaccgcctcgccgaaacgctcgaagcctgcggcgagaaggcctgcagcgcgcacgacatcgtcagcgtgatcttcaagcgccagttcgacatccaccagatgaccttcgccatgggcgagtcgctggcccacctgcactgcctgtggcaccgcggcgaactggtgcgggaaaccggcgacgacggcgtgatccgcttccgcgcggcctgactggcctagttggcggccgccagtgccgccaggtagcgcaccccgtcgatggcgcggctgccgtaccaggacagcatctcgccgtcgaccagcagcaccggcttgccaagctggcgctcgagcgcgtcggcgtggtcttcggtgaagcggtagggctcggtcgacagcagcaccaggtcgagctcgcgcaccagcgcgtcgctccagcggaaggtgggatagcgatcgccaggcgcgttggggcggctgcagtcgccgcccgcgcaggcctgcaatgcggcactgccctcgggccaggtgtgccagttggccaatgccagcatgcggctgatataggtatcgcgcgacaccgtcatccacgggtcctgccagatcgcatacagcacgcggcgagccggccacgcgcgcacgcggatggcatcgagctgcacctgcagcgccgtgcacagcgcctcggcctcggcgtggcagccgaagatcccgcccagcagctggtacagccccaggttgtcttccggcgcgcatggatgggtgacgatcacattgggcacgaatgcgcggatttcgtccacggtctcgcgccggttctcatcgatattgaccaccacgtgcgtgggtgccagctcgcgcagccgcgccacgttcacgtccttggtgccgccgaccttgggcaccgcgcacacggccggttccgggtggatgcagaagccggtgcgtgccaccatctgccgggccatcccgagcgcgaacagcaactcagtcaccgacggcaccagcgacgcgatccgcaccaccccgctggcggcggcatgctgctggccgatggcgtcgcgccacatggtcagggctcctgcggcgggtcggcgcgccgcggcttgcgcggagcgcccgcggccagcgcatcgtagagccagcgcggcatcacgtgcagcagcgccgccaccacgcccatcggccacggaatcacgcggaagcgccgtcctgccgcgattacccgcacggccttgcgcgcgaacacgtcggcatcggtcaggaacggcatgcggtacgggttgtgcgcggtcatcggcgtgcggatatagccgggcgcgatcgtgaccacgcggatgccgtgcgcgcgctgctccagccgcaggctttccagcagcttgatcaccgccgacttggacgcgctgtaggcgcccgcgcccggcagcccgcgcacgccggcgacactggcaatgcccaccagcgtgccgcggcgcccgaagtggccgggctcgcgctcctgcatcgcatgcatgaacggctggaaggtggtcagcacgccgaaccagttggtatccatcacctggcggaaggcgtcgaggtcctcgcgctcgctggcgacggtgccgaccgagaccccggcattggcgatcaccacgtccgggcagccgaaatggccgaggaagtctccagcggcacgcgccatggcgtcggcatcgcgcacatcggcgccgtagacgcgcaccgcgcccgggttgggcagcgtggcgacaaactcgcgcagcgcgtcctcgcggcgcgccaccagcccgaggatggcgccttgcgacgcgtattcgcgcgcgagagcctggcccaggccgctggaggcgccggtgaggaagactttgaggggacgcatgaaggcagggttgcagtctgaaaaaaaacggctggtacaggataccagccgtttggcttgctactggtgttggataaccctcggcttgcgaaggtcgccagcagattacatcttcttcgccttaacctgatccaccaggtaatccatggtctggatcgcgccctgcttgttgccggcaatcgacggcgaggtcacgtacttgccctgcaccaccacggtcggcacgccgtcgatcttgtaggcgtcggcgatcttgttggcgcgctgcgagttggtggtcaccgtgaacgagttgtaggcatccaggaaggccttgcggtccacgccgttcttggccatgaagtcggcgatctcgttggggtccgtcatgcgcttgcggtccacgtggatggcgttgaagaccttgttgtgcatggcgtcgagcttgccgatggcttccagcgcatagaagatcttggtgtgcggcagcaggtcgtcacggaacgcgaccggcacgcgcttgaagaccacgttgccgccctgcttcctgacccaggcttccaggtccggctcgaaatcgtagcagtgcgggcagccgtaccagaagaactcggtcacctcgatcttgcccgcggcgaccggttgggccgccttcaggacctggtattccttgccctcggcgggcgccgcccgggacggggcggacatcagcaggccgcccacggcggcgaacatggcgaacagtgcggcgagttttttcatcttggtgcggccttgcggttggacgatgagcgtatgacagcggcggcggcgtccggttcagcgaaacgccggctgcttctggtgacaacgtgttgcggcggttaccggcgattactgccagtgccgccggacacgaccggaataacgcctgaccctgcggtccggcttactgcttggtgaagcggatcaccgaggcctcgaagccggacgactgcagccggtcgcgtgccttgttcatgtcttcgatgcggttgaacggccccaggcgcacccggtacatcttgacgccgttgacatcgcgctcggtgatccgggcttcgaagccctgcatcgccaggttggccttctggcggtcggcgtcgtccgacgagcggaacgcgcccacctgcagcaggtagcccaccttgttggcatcggcctgggcgatctcggcgatcgggtcggccaccggcttctcggccggcttgctggcgacaggcttgtcagccggcttctccacgggcttttccaccggcttctcggccggacgggcgacggccaccgggggttgctggccgttctggccatgctggccgttctgcttcggttccggctcgggcgcctggcccaccggcttggccggggtcttgctccacagcggcttgttggggtcgctcgggccctcgtcggcgcgctgggccggcggcggcagctggctggtgacattgcccggctcgctcgggcgcggggcactcttctgctggaacggggtcggagacttggtgatgtacagggcgaccaccacggcgatggccagcccgacgatcagcccgagcaccaggcccaggaacgtaccgccgcgttgctggttgcggcggacatggcgcgactcgcgcttgcgttgctgttgcatgaagtcctcttcggtgatgccgggattatagggccagcgccgccaacggcagcactggcatcgtcctcggggccggacagccccgtacccccgcgcggggggcgccggacgcctgcttacatccggcgcggggcggacacgccgatcaccgccaggccattgcgcagcacctggcgcgtggccgccagcagcgccagccgggcgcgcttgacggcctcgtcgtcaaccagcacgcggtcggcgttgtagaaggcgtggaagtcgccggccaggtcgcgcaggtagaaggcgaccgcatgcggcgccagctcggcggcggcgcccgacagcatgtccgggaactcggccagacggcggcccagcgcctgcgcctgggcgctggcttcgggtccggtcacggcggacaggtcggcgccggccagctcggccaggcgggcttcccagtccgcgccgccccacgactcgaagatcgagcagatgcgggcgtgggcgtactgcacgtagtacaccgggttctcgtcgttctgcttgagcgccaggtcgacatcgaaaacgaactcggtatcggccttgcgcgacagcaggaagaagcgcaccgcgtcgcggccgcgggtgaagtgctgcggccagtcggccacgccggtatccaggcagccgcggatggtctcgtcgccgccgttggaccattcgatcaggtcgcgcacggtgacataggagccggcgcgcttggagatcttgacctcctcgccgttcttcatcacggtgaccatcttgtgcagcacgtagtcgggatagccctgcgggatgcccatgtccaggccttgcaggccggcgcgcacgcgcgcgatggtgccgtggtggtcgctgccctgcacgttgatgaccttggtgaagccgcgctcccacttggtggtgtggtaggcgacgtccggcacgaagtacgtataggtgccgtcgctcttcttcatcacgcggtccttgtcgtcgccgtcgtcggtggtgcgcagccacagcgcgccctcgctctcgtaggtcttgcccttgccgaccagcgactgcaccgcggcttcgacacggccgtcgctgtacagcgacgactccaggtaatagcggtcgaacttgacgccgaaggcctgcaggtcgatgtcctgctcgttgcgcaggtaggtgacggcaaacttgcggatcgagtcgatgtcctcgacgttgcccgacgcggtcacgggctcgccgtcagaagcgctgacggtcttgccggccaggaagtcggcggcgatgtcggcgatgtagtcgccgttgtaggcggcctcgggccagctggcgtcgccgggcttgaggccgcgcgcgcgcgcctgcaccgacagcgccagggtctggatctgcacgccggcgtcgttgtagtagaactcgcggtgcacgtgccagccctgccacgacagcaggttggccagcgcgtcgcccagtgccgcctggcggccatggccgacgtgcagcgggccggtcgggttggccgagacgaactccaccagcacctggccgtgcacgccgcgctcgcgcgcgccgtagtggtcgccctcggccagcaccgcgcgcagcacgtcggccttggcggccggggtcaggcgcaggttgatgaagccggggccggcaatctccatggcctggaccaggccctgcgcgcgcgtgtcggcctgcacggcatcgacgatgcgctgggccagctcgcgcggattgctcttgagcgcgcgcgcgacctgcatggcgacgttgcaggcaaggtcgccgtgggcggccaccttgggccgctcgaaggtgacggcgggcagggtggcatcggccggggcgagcgcgcgcaccgcatcagtgaacgcggcggcaagattggaggtctgaacaggcagcatggatgtcggaagccctgtgggcaaggtattcaggcaccgccttgggcggcgccgtcgcccggaaggcggcaagtgacggcaaaggaacagtgagcgccgcgccgcgccgcgtgacaggcattggaatcgggaacgccgaattttatcaggtgctatgctgacatcatgcgcgaggatggccccgggccacaatccgggcccaaaatcagcgagacttcccgcccgcgggaacgcccccgcctctccgtgaaaggaaaacacatcatgctgatcaccttcaaatcccacgccgcgcaggacctgatcatgatgaaggatctggcgatgacgctgctgggcatcatcggcaagcgcctcggggaacgaggggtgatcaccgtggaagagcttccaaccgcgatccacaagctggaagccgcggtcgccgatgccaaggcccatcccgccagctcggccgtcgaagcggacaccggcaacgacgaagacgaggaagaaccgctgcacctgggccagcgcgcctacccgttcctggacatgctgcgtgcctcccagcgtgagggggccaatgtgatgtggggggtgtgacgggaacaaacacccgcttgcgtgcggcacgatcgccgcgcgcctaaaaaagcgcccggcaccgcagtgggctgccgggcttccggacgaggattccggaaagggggattcccttgcaggacccgcccggcgtgccggacgggtcccggtatcggtctggtggctggggggcgggcctaatcctcctctgaatggcgccggccattggccagcagcagcccgatcagcgcccccacggccgccgcgatcgccaccgccttcagcggcgactcggccacgcggtgctgggcgtgttctaccgcaccatccatgcgctcgcgggcgcgcatcatgccgtcggtggtctgggcgcgcagccgatgggccatgtcggtggcccgctcgcgcaggcgctgcccggcgcgcatgctctcggcagagccctcgcgcgccagcacttcgatggtgtgctccagctgggcgatcagcgccttgacctcgccggataccggcgctgccgcgtcgcgcgtgtcgcgcgcggcatgcctgatatggcggatggcactgtcggcactgtcggacaggtggttcagttccttcctgactttcgggttctgcgtcagcatacggtctcctcagtttcggtcggcggtggggaaagacggctcgcggccggtgtcatcgccccctgcggaccaggcccatcaccgcggcgaccagcgccacgaccaggaagatgaagaacaggatcttggcgatttccacggcgccggcggcaattccgccgaagccgaagatcgcggcgatcagggcgatgacgaaaaatacgagtgcatattgcagcatggctaggctcccgaagcaatcggaccacgccaggcgcactggctgggcccatgtgagggcttgcgccaaggggtgcaagctcatagcctcatcgtagaaagccagcccgcgcaccaatactgacagcgagccgattccgctgtcagccgagtcctacacgcacccggacgacgcccgcgcgggcccggcttcaaggttgacccatggcgatcgatgtgattccatgggcgctccctggcgctgcggcgggcgagcggcgcgccttcactaaacaggaattgcccatgttcaagcagtcctttctcccccacacgctgctgctggcgggcggcatcctgctgacgctggcggtgctggtggcgtcggaaaccggcaatatccgcctgcgcgaaagctataccgacgtgatccgctcgcagcgcgtgcagaccgagctggccgcgctcaacggcgagctggtcaatgccgaggccggccagcgcggcttcctgctgaccggcaaggaaagctaccttgagccgtactacaaggccctgccgcgcatcgccgaactgatggcgcagatccgcgccggctatgccaacgatcccgaaggcctgaaacagttcagcgacacctccaagctgatcaacagcaagctcaacgagatggcgctgacgctggtttacggcaagcgcgacctggaagtggcgctggacctgatccgcaccgactacggcaaagagaccatggacaatgcgcgccgcggcctggaccagctgcaggcgcgcgaggccggcgcggtctcgcaccggctggaaggcgccgagaacgacgtgcagctgtcgcgctacggcatcggcctgcttaccgccatcaacatcaccctgatgatggcggtgggcgtgggccacgccaagcgcctgtcgatggctgaggcggtgcgcacccagctggaagaggaaggcgtgcggctggaccgcaaggtgcgcgcacgcacgcgccagctgtcggcgctggccgcccacctgcagcgcgtgaccgaggacgagaagacacgcctggcgcgcgagctgcacgatgaactgggcgccatcctgaccgcgatcaagctggatctgcactgggtgcgccgcaaggtgcaggaggaccatccggtggcggccgagcggctgacgcgcgtgatgctgcacgtggaccagggcatccagatcaagcgccgcctgatcgaagacctgcgccccacggtgctgctgaacctgggcctgcgcgcggcggtctgccagctggtcgaggaagtgggcgcgcgcaatgactgggagaccgatgtcagcgtgcccgaggacctgcctccactgcgcgacgaggccgcgatcgcgctataccggatcgtgcaggaatcgctgaccaatgccagcaagtactctgaagccaggcacatcgatgtcagcctggcctgccaggacaacctgctgacgctgaccgtgcgcgacgacggcaagggcctgccggcggacttcgacgccggcagcaccgccggccaccacgggctgctgggcatggagcagcgcgttaccgcgctgggcggcagcatgcagatcgattcctcgacgcaggcgggcgtgcgcatccacatcgaggtgccgctgacggaagcggtgctggcaccggcggaggcgccggaaaatcaggagccggcgcgcgcctgacgcgcaccggcaggcagggaatgatgaaggaacgaggggctgggccggctcagggcgccggcgccgcgtgctcctcgatcacgcggaacacctgctcgagctcgagcgacttgtcgaagaagtagtccgcgccggcctcggcgcactggcggcggtacatgctgacctgggcgtggttggtgtagacgatgcgcaccgcgccggtgccgatgcgctgcatcgcgcgcagcacattgatgccgttgccctggcgcagctgcaggtcgacgatgaccacatcgtacttgccggcggcgagcagccgcagggccatggcttcggtatcggcccagtccacgttctcgatgaacgggaaatccttcaggtattcgagcagcatgcctcgcaggaccgccgagtcttcaatcagcagtatgctcagcgcccggtaggaagtgttcgaagcctgctccgacatgttatgtattgctggtcctcgtccggtgcggcccatcgtgggctgctattcgaccaggccgttcttgatggcgtaataggtcaggtcagcgttggtcttcatgcccattttctcgagaatgcgcgaacgataggtactgacggtcttgacgctgagaaacagttcgtcggcaatcaccgacaccgactgcccccgcgacagcttgcagaagatctggaactcgcgctccgacagcatctggtgcaccggctgctcggtcggcttgtcgagcccgccgatcagcaggtcggccacggtggcgctcacgtagcggcggccctgggccaccgtgcggatggccttgaccaggtcgtccggggcgctttccttggtcaggtagccagaagcgccggcacggatcaggttgatcgcgtactggtcttccgggtaggtcgacaggatcaggaccggcaattcgggcttgcgctgacggatcagcttgagcacgtcgatgccgttgcggtcgggcatcgagatgtccaggaccagcacgtcgaactcggcatcgcgcaactgcgccatgacctggtcgccgcttccggcttcgcctgtcacctggatgtcgggctcttcggaaaggaactggcgcagcccggcacgcacaatctcgtgatcgtcagcgatcaggatgcggatcatgtgggctccactgggttgaacagaccggcacatgcccggtgcagtcgggtgcaggcggaaccgcctgcgttgatgtcattgtagtgccgggcgcgggcgcgggctgtcggtgtcaggctgacattaggcggggccagcgcccactaggcacactgatcgcgcacaaacgcaaagcgggacggatgcgatccgtcccgctttgctgcggcgcgtcagggctgaaacaccctggagggccctggcgccgccggcgccggtaaaaggtcgggctagtagctggttgccagtgactgtggactagcgcgccaggttactgcgccttggcacccgctgcggcaccggcgctcacatccacgctcgcgtcggccttcgacttcttgcccgacttggtggcgtgcttgccgtgcttggccttggtgccggcgtctgccgcggcgccgccggtggcgtcggcagcagtgccgacactcttgtcgaccgcagcgccggcggtcgacagacccttgtcagccgccgaacctgctgccgacaggcccttgctggtcgccgcgcccgcagtcgacagacccttttcggctgcgcctgcggcacccgtggcagcgctgccggcagtgttcaggccgccctgcgctgcagcggcgggagagggtgtggtcaccgatgcgccgacatcggccttcgtgccaacggaaacgccggtgccttgggccatggccagcgaggaagcggcagcgatcgacagagcggagagggagagcagcagtttcttcatggacagactcctttcaggatgccccgcggcgaaacattcgccgcggtgatcacgctggtgattgcgtgtatcgagccctcagtctagggagccggactgcgccggtctgtgaggagttgaaaggctctgtaaggagttgtgaggcgcctggcacgccgctccggcacggctttgccggccgcctgcggcggttttccctgttgcatcaacgggctggcggcggggcgatgcagccgcccctgccgccctgccgtcgcacccggttacaggttgggcgccagcgcgcgctccagcgtggcgcggtcctcgtggcggcgcgccgccatgtcgtcgagctggtcctggccgatcttgccgatggagaagtaggtcgactgcggatgcgccaggtagaagccgctcaccgatgcggccggcgtcatcgccagcgactcggtgatgcccatgccgatctcggccgcgtcgaggaactcgaacatcgggcccttgacggtgtgctccgggcacgccgggtagccaggcgccgggcggatgccgcggtacgactcggcgatcagctgctcgttgctgagctgctcgccggcgtcataaccccacaagtccttgcgcacgcgttcgtgcaggcactcggcaaagccttcggcgaagcggtcggccagtgccttgagcatgatcgcgctgtagtcgtcatggtcggcttcgaactgggcttccttcttctccacgcccaggcccgcggtgaccgcgaacaggccgacgtagtcggcgatgccgctgtccttgggcgcgacaaaatccgccaggcaacggttggggcggcgcacgccatcgaccaccgggcgctcgctctgctggcgcaggttgtgccaggtcagcgcgaccttgctgcgggtctcgtcggtgtagatctcgatatcgtcgtcgttgacggtgttggccggcagcagcgcgatcacgccgttggcggtcagccagcgtccctggatcaggcgcgacagcatggccttgccgtccgagaacaccttgcgtgccgactcgccgacgatttcgtcgttgaggatgtcggggaatttgccggccaggtcccaggtctggaagaacgggccccagtcgatgtagttggccagttccgccaggtcgtagttgcggaacacgcgccggccgatgaacttgggcttcggcggcacgtagctgctccagtcgatcggggtcttgttggcgcgcgcctgcgccagcgtcaccatcggcgtcgccttcttgttggcgtgctgggtgcggatgcggtcgtagtcggtcttcagctcgtccaggtacttggccgcgccttcatccgacagcaggctcgaggccacgctcaccgagcgcgaggcgtccggcacgtacaccaccgggccttcgtaattgggcgcgatcttgaccgcggtatgcacgcgcgacgtagtggcgccgccgatcagcagcgggatcttcttcacgcggaagtagtcgtcgcgctgcatttccgaggccacgtaggccatctcttcgagcgacggcgtgatcaggcccgacagcccgacgatgtccgcgccctcgaccttggcgcgggccaggatctcgttgcacgggaccatcacacccatgttgaccacttcgaagttattgcactggagcaccaccgacacgatgttcttgccgatgtcgtgcacgtcgcccttcaccgtcgcgatcacgatcttgccgcgcgccttgacgtcgccgccggcctcggccagcaggcgcttctcttcctcaatgtagggcagcaggtgcgccaccgcctgcttcatcacgcgcgcgctcttgaccacctgcggcaggaacatcttgcccgcgccgaacaggtcgccgacgatgttcatgccgtccatcagcgggccttcgatcacctcgatcgggcggccgccgcgcgcctcgacctgctggcggacctcttcggtgtcttcgacgatgaaggtggtgatgccatgcaccagtgcatgcgccaggcgctcgcccaccggcaccggctgctcgggcgtgccgcgccaggccaggttctcttccttcttcgcgccgccgcccttgaagcggtccgcgatctccagcaggcggtcggtggaatcttcgcggcggttcaggaccacgtcttccacgcgctcgcgcagctcgggatcgagctggtcatacacgccgagctgaccggcgttgacgatgcccatgtccatgcccgcgccgatggcgtggtacaggaacacggtgtggatcgcctcgcgcaccgtgtcgttgccgcggaacgagaacgacacgttggacacgccgccgctgaccttggcgtacggcaggttctgcttgatccagcgcgtggcctcgatgaagtccaccgcgtagttgttgtgctcctcgatgccggtcgcgaccgcgaagatgttcgggtcgaagatgatgtcttccggcgggaagccgacgtcattgaccaggatgtcgtagctgcgcttgcagatctcggtcttgcgctcgaaggtgtcggcctggcctttctcgtcgaaggccatcaccaccgaggcggcgccatagcggcggatcagcgcggcgtggtggcggaactgttcctcgccctccttgagcgagatcgagttgaccacgggcttgccctgcacgcactgcaggccggcctcgatcacttcccacttggacgagtcgatcatgatcggcacgcgtgcaatgtccggctccgaggcgatcaggttcaggaagcgaaccatggcggccttcgagtccagcatggcctcgtccatgttgatgtcgatgatctgcgcgccattctcgacctgctggcgggccaccgccagcgcctcgtcgaactggccgttcaggatcatgcgcgcgaaggccttggagccggtcacgttggtgcgctcgccgacgttgacgaacaacgtgtcgtcgtcgatggtgaagggctcgaggccggacaggcgcatcgggcgcgggggcagttgcttgtcggtcatgttgtcgggctccgggctcaggcagcgtcgcggtactggccgggccaggtgcggggggtcttgttggccacgcgctgggcgatcgcggcaatatgctcgggcgtggtgccacagcagccgcccaccaggttcaccagcccggaggcggcgaactcttccaccagcgacgaggtgacctcgggcgtttcgtcaaagcccgtgtcgctcatcgggttcggcaaacccgcgttcgggtagcacgacaccgccgcgtcgcagatcttggccagctcggcgatatacgggcgcatcagcgtggcgcccagcgcgcagttcagcccgaaggtgatcgggcgggcgtggcgcaggctgttccagaacgcttccacggtctggcccgacaggatccggcccgaagcatcggtcaccgtgccggagatcatcaccggcaggcgctcgccggtgtcctcgaacagctggtcgatggcgaacagcgccgccttggcgttaagcgtgtcgaagatggtctcgaccaggaacacgtcggcgccgccttccagcaggcccttgccctgttcgtagtaggaatcgcgcagctcttcgaaggtcacgttgcgcgcgcccgggtcgttcacgtcgggcgagatgctggcggtcttgggcgtcgggccgaaggcgccggcgacaaagcgcggcttctccggcgtgctgtacttgtcgcaggcggcgcgcgccaggcgcgcggcctcgacgttcatctcgtacgccaggtccgccatcttgtagtcttcctgcgccacgccggtggcaccgaaggtattggtctcgatcaggtcggcgccggcggccaggtactgctcatggatctcgctgatgacctgcgggcgcgtcagcagcagcagctcgttgttgcccttgacgtccaccttgtgttccgcgaagcgcgcgccgcggtagtccgcctcggtcagcttgtagcgctggatcatggtgcccatggcgccatccaggatcagaatgcgttcttgcagcagccggggcaactcggcagcccgggtgtaggggcgcggcgcggccgcggtggattcaggggcactcatggcggggactctggaaaggcgggcctgcggcgtatccatggctggatcggcgccgggccgctgctgtggcctatgctggccaaagagggacgattttatcaggtgtatcaaggccttgcggctgcccgcgatgacccgcggttgcctgtccggcccgctggcgcctacactgagagacgtaaccgtcaccgccccggtcgcttcgcgctgcccccttccctgcccgccatgcaacatctctcccccgccgacgcccaggacctgctggcgcaatcgcccgagacgctctttatcgactgccgcagcgagatggaatacctgttcgtcggtcatccgaagggcgcgcacaacgtaccctggaacgatggcccggactgggaggtcaacccgcatttcgtgcagatggtgaagaaactggcgggccaggcatcggcgcggccggtgctgctgatctgccgcagcggcaaccgctcgtcggcggcggcgcgggcactggagggcgcgggcttctccaacgtccagttcgtgctgcacggcttcgagggcgacctcgatgcgcagcgccaccgcaatacggtcaacggctggcgccatgacgggctgccgtgggaacaatactgagcgcggcccgcagcgcccaccaccaacaaaaaagcccgccgaagcgggcgtgatcgttccaggcaaagccgctcagtgcatcaccagcgggtgcatcatgacgttgtcgaacttgccgagaaaatcgtcgacttcctccacggatggctcgctttcgatcaggcgtttgacatcggcgcggaagctctcggccagatggccgccgaggaagatttcgcgcttcaggttcttgtcgacgatttcatagccaccaaactcaagcggcgcctgatcgacatccgcaccaaactccacgatgcagtagttgtcgctgttgtagatcatttgcatggcacacctcctgggcgtcatggatgggcggcatgcccttgtggttcttgcctcagttgatgccttgagggggcgccgcggctttacctccaaacttggggtgaccggcgggaaatcaagttattggtgcgggtcacctcgttgccacgattttctgccttacatgaattgggcatcggccaatgcaacaagtttcttgagccttccacatcagtgtgttgcttgtcacggaacgtcgcactgccccccgcatgcggcattcccgagaaaggcgtccagcgcggcgtggaagcgctcgggctgctccacgtgcaccaggtgcgccgcttgcggcacgacctcgagcctggctccgggaatcgccgcggcgatgctctgcgccatcgccacggttgcgccctggtcctgctcgcccgctactaccagcgtaggacaatgaatgcgggaaagcgcgccggcaaggtcaaaagccatgattgccccggccacacccacgtatccacgtaccggcgtggccaccagactgtcgcgaatgcgcgacacctggtcgcgatgcgcctcatggaaggccggcgtcagccagcgcccgagggtggcatcggccatcccggccatgccatgggcctcggcctggccgatgcggttgtgccacatcgggtgcgcctccatcggggtctggctgttggtggccaccagcgccagcgacagcagccgttcgggatggcgcagccccatggtctgcccgatcatgccgcccacggaaatcccgcagaaatgcgcctgggggatctgcagcgcgtccatcaccgcgaccacgtcgtcggccagccgcgtcatggtgtagggcccgagcggggcgtcgctggcgccgtggccgcgcatgtcagggcgcaccacgcgatagcggcgcgccaggtgctgcgcggtggcatcccacagcgtgtggtcggcagccagggcgtgggccagtatcacccagggcccgtccgccccgtccacgcgcacgtgcaggtcggcgccttcggcgtggatgcggtgggtttcggctggtggcgtggcaacggtcatggctgggctcctttcggttggatgatgcgtcgggaggcgcgcgccgcggtcctactgcccttccctgccgcggtacacgaggtcgatctgggtgccgtcgggctcggtctggcgcaggcgcaccggcatccagccgagcgactgcgccagccacagctcgacgcggcgccggtcattggcacggcgctgcagcctcacaaagtgctttgctcgtatcacgccgttgccggtgtcgatctcgtcctctccaacatactgtacttgcatgggttccacatcccgcgtgtcggccacgaggaacgcttccgtcactccgggggtggcgtatcgctggggattgccgcgcaccagccccaccagctgcaggaatacgctgaagcggtcctgcgcgccgggcgggaacggcgcctgcgtgcccgaggcaaataccgcggtgccggccgcggcatcgaaccgcgaggtctcggtcttgttgcggcggcgctcttcgtagcgttccggcaacagtccctgcaccgccatcgcgccgccgctctggaaggcaaagcggaaccacagcacgcgggtttcgaccgccagccggtagcggctgccgtcctgctcccagcggatcaggccgtcggggttctgcacgccgttgacgaagctggcgtagtgcatcgtcgccgacggcggcgggtcgtagcgcacgccatcgacgccgccctgcggcccgccggacggcgcggcagcggcggcaggcctggccgcgctgccctcgccgccactgcccgacgccatctcggtcgcgccctgcgggctggtggcgagcgggggagcgggggcttcctgcggcgcgggttccggggccggcgcggccgccctgggctgcgggcgcgggcgcggcaccggccgcggcgcgggtggggctggcggcctgggcggcggcagcagcaccgcttccagcgtgggcgtgttgctgacatccaccgggatcagcggccccggcatgcgcacgaagcccaccacggccagcacgtggaccagcagcaccagggcgatcacgatgatccagcgccgccggcgccagacgcggggatccgcgccgggccgggcgtggagatcaggattggccggtttctccggccggggtggctgcaccaaggtagccaagttccgatgagagctgttgggcgatgtcgcggatgcgacgatccatcgtaccgccccattctgcatcgaatatgctctgcgcgcccagtacgatcagccccatggccaggtggccgttggcattgaacaccggcatcgagaacgcattgatgcccggcagcacgccgccgagcgtgcgcgccgcgccatgcgcgcgcacctcggcgcagatcgcgtcgtattcggccagcgagcgcggcatgtcgggcaagccgtcattgccgcgagcgcccagctcgcgttcgatcagcggcagggtctgcttgcgcggcaggtaggcgccgtacaggcgcccggtggcggagttcagcatcggcatcacatcgcccaggcgcaggctgacggtgacgggatggctggattcctcccagtgcaccacggtgggaccgtggttgccccacacggcaatgccggcggtcaggtccagttcgtcgcgcagctgcgacaggatcgggcgcgccttcttgaccggatcgaggcggttcagcccggccaggcccagctgcagcgcgaacgggcccaggtcatagcgcccgctgacggggtcctgcgccaccgcgcccagccgcatgaagctgaccaggtagcgatgggccttggccgggttcatgtcggcggcggcggccaggtcgcgcagcatcatcgcgcgcggcgacaccgccagcgcctgcagcagcctgaagcccacctcgatggactggatgccggaacgcagcttggtgtcttcttcttcggtctctgacatgcggcggatggtttgctccccgggaggcgggggaaattcgtaggtaaatttactatagcgaaatcgatttaccaatttttaagccatcggtagactttcttcgcaacagacctggccggcgacatgcctctcgtgcaagcccgcccgaaccgggcccctttttaacacggagacaaccgatgcgcccccttggccacttccgccccgccctcgccgcattgacggccggtactctgtttgctgccctgttcaccgccagcgcccccgcgcgcgccgatgactggccgtcgcagccgatccgctgggtcgtgccctatcccgccggcggcggcaccgacgtggtggcgcgcactgtggcgcaggccatcaccccggggctgggcaagcaggtggtgatcgacaaccgcccgggcgcggccaccatcgtcggcgccgatgccgtggcgcatgccaagcccgacggctacaccgtgctgaccgccgacaccgccacgctggccgccaatccgtcgctgtacaagaagctgccgtacaacccggacaaggacttcgtctacatcggccagcttgcgcgcttcccgctggtgctggtggccaatcccaacttcccggcgcgcacgctcaaggaagtggtcgcgtacgcgcagaagaacccgggcaaggtcaatttcgcctcgccgggcgcgggcagcccgcaccacctggcgatggaactgttcatggaccagacccgggtcaagatgacgcacgtgccctacaagggcgcggcgccggcggtgcaggacctgctcgcgggccaggtcgacctgatgttcctggacctggcctcgggccagcagaacgtgcaggcgggcaagctgcgcgcgctcggcgtggccacgcccaagcgccttaccgtgctgcccggcgtgccgaccgtggccgagggcggcgtggccggcttcgaggcctacgcctggcaaggcatggtggcgccggccggcacgcccaaggccgtggtcacgcgcctgaatgccgagctggtcaaggcgctgaagacgcccgaggtgcagaagaagctggaaggcgtgggcgtggaggcggtctacagcacgcccgaggaattcgccagctacgcgcgcgccgagggcgagcgctggggcaagctgatcaaggccaagggcatcaccgtcgactgactggcgcgcgggcaggccacggtagactagcggccaacgcgcctgcgatgcaggcgcccctgatccctaccccatcgcacccatgaaactcgcaaccctgaaggacggttcgcgcgacggccagctggtggtcgtgtcgcgcgacctgaagcaagcccactacgccaccgacatcgccggcaagctgcagaccgtgctggacgactggaatttctacgcgccccagctgcaggacctgtacgacgcgctcaacgccggccgcgcacgccacccgttcgcgttcgcccccagggactgcatggcaccgctgccgcgcgcctaccagtgggccgacggctcggcctatgtcaaccatgtggagctagtgcgcaaggcgcgcggcgccgagatgccagccgagttctggaccgacccgctgatgtaccagggcggctcggacgacttcgtcgggccgcaggacgatatcgtctgcgccagcgaggccttcggcatcgacttcgaggccgaggtggccgtgatcaccggcgacgtgaggatgggcgccacgcccgagcaggccggcgacgccatccgcctggtgatgctggccaacgatgtctcgctgcgcaacctgatcccggccgaactgggcaagggcttcggcttcttccagagcaagcccgccacggcgttctcgccggtggcggtgacgcccgacgaactcggcgaagcctggcgcgagcgcaaggtgcatctgccgatgaccgtgcactggaacagcaagaaggtgggccagcccgactgcggcactgacatggtgttcgatttcggccagctgatcgcgcatatctgcaagacccgcaacgtgcgcgccggcagcatcgtgggctcgggcacgatctccaacgttgatcgcaagaagggctactgctgcattgccgagaagcgcatgctggaaaccatcgatgaaggcaagcccgtgaccgagttcatgaagttcggcgacgcggtcaagatcgagatgttcgacgcgcagggccattcggtattcggcgcgatcgaccagctggtggcagcggcctgacgcaggtgggggccgctggctgcggcggcgagccggatgtgcatataattaaccgaccgatcggttggcaaataacgatgcatgcggcgcgccgctaaccccttcctctcaggcccccaatgactacccccaccgctgaccccacccccctctccccccgctacgagcgctatcgcgcactgacgctgcgccgccacggccccatcctcgaaatcatcatgggcgcggcccagtcggccaaccagaagctggccacggcggacgccaacatgcaccgcgagctggccgagatctggcgcgacgtatccgccgaccccgaggtgcgcgtggcgctgatccgcggcgagggcaagggcttctccgccggcggcgacctggcgctggtggaagacatggccaacgacttcgagacccgcacccgcgtctggcacgaggcgcgcgacctggtctacaacgtcatcaactgcgacaagccggtggtctcagccatgcacggtcccgccgtcggcgccgggctggtggcgggcctgctggcagatatctcgatcgcggccaggagcgcgcgcatcgtcgacggccatacccggctgggcgtggccgccggcgaccatgccgcgatcgtgtggccgctgctgtgcggaatggccaaggccaagtactatctgatgctgtgcgagtcggtcagcggcgaggaagccgagcggatcggcctggtctcgctggcggtggaagaggacgaactggtggcgcgcgccttcgaggtggccaaccggctggcggccgggtcgcagaccgcgatccgctggaccaagtacgccctcaataactggctgcgcatggccggccccgccttcgacacctcgctggcgcttgaattcatgggctttgccggccccgacgtgcacgaaggcgtggcgagcctgcgccagaagcggccgccacagttcaggtaacgacgacgcagccgccggcccgacgggccctcctggccaatcccggggctgcgccgcacacggagcgctcgaccatgttcggacagattcccgatttcaccaacggcttcgacttcatgcgccggctgtggggcagcggcagcggcatgcccgccggcatgatgcccggcctgcaggcaatgacgccgccgatggacctcgacgacctcgacaagcgcattgccgacctgaaggccgtggagagctggctgcaactgaacaccaacctgctgcgcaccaccatccagggcctggaagtgcagcgcgccacgctggtggcgctgcagaccttcggcaacgcgctgtcgcccgaggccatgcagtccgccatggaaaacgtcgcgcgcgcggccaacacgcccagcgccgcagcgccggagcgcgacgccggcgcggatgccgacagcggcacgcaacaagagccgcctgccgccgagcgcccgcaagctgcggcaagcgacaccgattccgccttgccgcccaacgccgcgctgtggtgggacctgctgcaacagcagttcaaccagatcgccagcagcgccgccgcggccagcatcgccccgttcggcatgggcggcgtgggcggcttcggcaccgcagccagccccgacgccgcagcgcaagcggcggctgcaaaaccgaagacggacgcgcctggcaaggccgcctccgccggcacgggcaagcccgccgccaggaaagcgccggcaaagaaggcgccggccaaaaaggcggccaaggcaaaaccggccagggacgccggcaacggcgaggacaatggcaagaacgggggcaacaacggcgccaacggcagcagcgcagcctgaccgccagatactccgacaaatcgtccacaccaacgcaatgcaccgcgagtccttcccggccccccaccccgcgtcgcaatccggacccaatcccgccgccaccgcgctgatcatgatgggcggcggcgcgcgcgccgcctaccaggcgggcgtgctgagcgggctggcgcgcattgccgcgcggcacggcaagggccatggcgcgatgcccttcggcatcatcgccggaacctcggcaggggcgatcaacggcgccgggctggcaatccaggcgggggacttccaggccgccacgcagagcctggcggcgctgtggcacagcatccatgccgacgacgtctaccgcaccgacgtgctgcgcgtgggcgtgtcgggtgcgcgctggctgtccacgctggcgctgggctgggccacgcagcggcgcgcgccccgtgccctgttcgacaacaccccgctgggcagcatgctgggcgagctgttcgagcccgagcgcgtgcaggccagcctggacagcggtgcgctgcaggccttcgcggtcaccgcgctgtcctacagcaccgggcgccacgtgaccttctaccagtcgcaccaccgcatccatccgtggcaccgcagccagcgcattgcgatcccggcgccgatcacggttgaccacctgctggcatccgcgtcgatcccgttcctgttcccggccatgccgctggagctggacggccaccatgagtggttcggcgacggcaccatgcggcagatgtcgccgctgtcgccggcgatccacctgggcgcgtcgcgcgtgctggcgatcggcgcggcctcgcgccagcgctcgggctggtacgacaccatgccggccggcggctacccgtcgctggcgcaggtgggcggacaggcgctcgccagcatcttcctggacgggctcaacgccgacctggaacggctgctgcatatcaaccgcctgctggcgcgcatgccggagctggccggcgaccgcgagggctggcgcccggtgcaggtgatgacgatctcccccagcgagccgatcgaagccattgccgccgagcaccagaagcagctgccgcgcacggtgcgcgccctgctggcgccactgggcggcaccgaggcgcgcggcgccgccttcgccagctacctgctgttcgaacccgccttcacccaagccctgatggcactgggcgagcgcgatgccgaggcccaggcggacgagctggcggcgttcctgttcggcgtcgtcccgggcacgccaccggccgcgctgccggtggacgaacgcgcgctttcgccctgagcacccgccagcacatggcgtcctgccaggcgccgcggctggcacattgacgcctcggcgctccgctgatcgcccgcaatatgcagccggctgcgccaaaccgcgtcaaaaagcgttgcatttgccccgatccggactaaaaaaggagaagagaataattcgcatctggtagaatctgcccgtaatttcaaaggcttaccatgctctaccccgaactgttcaaatcgttggaagccgtccgctggcacatggacaaggacatcccctgggactcctttgacgccagcatgctgacggacgaccaggccaagaccatccggatgaatgcgatcacggaatggtccgccctgcccgcgaccgagatgttcctgcgcgacaaccgccacgattctgatttttcggcgttcatgagcatctggttctttgaggaacagaagcactcgctggtgctgatggagtacctgcgccgcttccgcccggacctggtgccgaccgaggaagaactgcacgcggtgcgcttcgagttcgacccggccccgccgctggaaaccctgatgctgcatttctgcggcgagatccgcctgaaccactggtaccgccgcgccgccgaatggcacacggaaccggtgatcaagcatatctaccgcaccctgtcgcaggatgaagcccgccatggcggcgcctacctgcgctacatgaagaaatacctggcgcagttcggcgacagcgcgcgcgccgcctttgccaagatcggcgtgctgatggcctcggcccgccgcaccgagaagccgctgcacccgaccaacctgcacgtcaacaaggcgctgttccccaacgacacggtgcagtcgcgcctgccggatccggactggctcgagcactggctggacgagcagatccgctttgacgaaggctgggagaagaaggtcatcgaacggattctgcacaacatgtcgctgctgttcgaacgcaccttcgaaaccgtgcaggacctgaaccgctaccgcaaggaactgaacgccagcctgcaaggctcgggcggggcccagccggcgcaagcctgagcggccagtccggcagcacgaaaaaaagccccgccgaagcggggcttttcttttcccttcttttgccttgacgcattcccgacaaatgcgacccgcggcggcgcaccggacctggtccggctgtggcgggtattctgcgatgctgatttccttgtcccggaaattcgagcgcctggcatgataaacgagcgagttgccacgcaggtagtaaccggttactacatcattccattcccgtcccgcgcactgccgcgctctcgcgcggcggcggcaaacccacgcctggcgtccgtttgtcgaatagatttatatccggaaatagaatatttaaatcacgcctcaattaccccggccatcaattcgatgtaaatccagcattacgaattcatttaattcgtggtgtaatgcctagcaattccgataatatcggaattagcgccagccgcagctggcagcaacgcgcaggccgcgcatatcgacgccgtgcggcaggcgctgcagggcgccttgcgcggcattgccaccgcgtcggtgcagcaggcccggccggtctccgatccggcagccagggatgtcgccaacgacgcggccatgaggctgtgcgtgacggggtaaccaggaccccgccgccggcggggatcccaagaaggggtaccatctcgggcaagcacgccggctccgaccaggggccagcctccactttccgatgccgaccccatgtccgtacccgctttcgaatccaagctgaccctgcctgacacccccgccgcgctggccgcgcgcatcgccgccttgccgcgcccgctggtgttcaccaatggcgtcttcgacatcctgcaccgcggccatgccacctacctggcacaggcgcgcgcactgggcgcaagcctggtggttggcgtcaacagcgatgcttccgtaaagatgctgggcaagggcgacgaccgtccgctgaaccatgaatcggaccgcatggcgctgctggccgcgctggagtcggtcgacctggtggcgatgttccgcgaacagaccccggtggaactgatccgcctggtgcgccccgacatctacgtcaagggcggcgactacgacatcgacacgctggaagaaacccggctggtgcgcagctggggcgggcaggcctacgccatccccttcctgcacgaccgctcgaccaccaagctgctgaccagggtgcgccagggcagctaaggcagcccagggcgctcaggagcaggccagcacgtcctcggcgccgtagcgctggcgcatggcctcgagccgggcacgcgccgcgtggtcggcatcgcgcacgcgcagccactgccgcgtgagcggccgcgcggcctcggtcagcatggcggtacgcacgccgtagccgcgcagggtatcgagatattgctcggcacgctcgcgctcgcggaagaggcccagcgacaccgtataggtgggggcctcgggcgtgccagcggtcaccagcgagtactcggtcacattgcgccggcgcagttcggccagcttgcgctcggcatgctcgcgcgtgggctgcgcgggcagatggacccaccagcgcacctgttcctgccgcgcgaacgcttccacgcgcagcgcggcggcggccaggtcttcagtggcgcggcgcgccgcctgggcgctgaagccaccgatctcgacgcaagctgccgccagcgtggcggacggcagcgcgctgcgcggtgcggcacccgccgccggtgccgacgccggcgcctgcacccgcatccgctccccacgaacttgctgctgcagccgttgcggttcacgcggggtttcaaaccagccggccagcgggttcgcgccgaacaccccgagcaccgcccccagcagcacggcattggcgagcagcagcaacagcgggacgatgcgcggcgagcgtggccgggcgggctggcctggggcggtcatgggtcggggcggattgaggctgtgagaagttgcgctgcgcgctagtcgccggccgatgccatcgccatcgcgtgcaggccgagcagcaccagattatcgtgcatctcgaacggcacggcgagcgcgcctgccagcgcgccgcgggcaccgccggacagcaggcagcgcacggggcccggcccgcgctcgcccagcacacgccaggtgcgttcgatggcgccggcctgcgcggccaggcagcccgcggcaatggcgtcgtgcgtattgtcggcccagcgcaggtgcgcgccggccacggtgccggcatcgtccacgtccagcgccggcaactgcgcggtgttgcgcgccagcgtgcccagcatcagcgccagcccgggcaggatcaggccgccctcgaagcgcgcgctgccatccgccgcggccgtgacgatatccagcgtggtggccgtgcccgcggtcaccaccagcagtgtgtcgtgcggcagccagcggtgcgcgccgatggcgccgacccagcggtccacgcccagttgcgtgggctcgcggtagccgttggccaggttgccgtgcgcggcggcgctgcgcacccattgcaccggcgcacagcctccgaaggcgtcggccagcgccacatccacggcggccgcgatcaccggcccggcgacgttgctgatccacaccgacggcatcggcccgctgccgcgcagcgcgcgcaggtcagcggccagcgcctgcagcgcgccggcgtcggcatgggtaaccgcgccgccgtgctgccacggcgtgggcagcgcgctggtggcgggcagcgccgcaccggcttcgcaccaggcccacttgaggcgggtattgccgatatcgatcagcaggagcggcgcgctcatgcggtgtctccctgccccggcgcgggccgcagcgacagctcgccgctggcgatgcgctcaagccccgccggcgtttccagcagcaggtggccagcctcgtcgacgccgcgcgccatgccttcggcgatcaccttgccctcgtgcagcagccgcaccggctggtcgcggtaggcatcggccgcggaccagcgccgtgccatcggcccgaaaccgtgcgccaggaacgcgatgcgcatggccgccagccgttccagcagcgcggccagcaggcgcggggcatcgcgctgcgcgtcgaagccgggcatggcctcggccacgccagccagctcgcggcccagcgccgcttccatctgcgcgtcgcgcaccaggttcaggccgatgccgatcacggcccagacgcgctgcggcccggcgggcaccgactcgatcaggatgccggccagcttgcggccatcgatctggaggtcgttgggccatttcagcccgatccgtgcgccgagtcgcgcatcgacatcgcccagggcctcggccagcgccaggcccacggccaggctcaggccgctcagttgcgccggcgccagcgccagtggcagtgccaccgagaaggtcatgcctgcctgcccctgccacggccggccctgacgcccgcgcccggcggtctggcggtaagccaggcgcagcctggcggcgtcggtccacggcgcctggcggcaggccgcggtcaggtcggcattggtggagccggtttcctccaccagctccagcgtccagtcgctcagcgcgggcgacagcatgccgcgcagcgcgccggcatcaatgcgccagttggcgccggatggggcggaagggtcggatggagtcggaggaacggcggacatgcgcggcaaagggttgggatcgatggcgatcgtagaaaacacaggcggggacggggtgcggcccgggtgcctgcggcagatgccgcattgtagccgcgccgccgcctcggcacggcgcggtcgcgccagcggggcgggtggcttagaatcgagactcggccatcacatcgcatgcccttggaacgccagacgacgccagacttccatatcacgcgcggggacggaaccgtcagcgtagcgctgcgtggcgactggaccgcgctcgccctggccggctgccaccaggcgcggcaactgcgcgcgcagctgcatgagctggcgcaggcgccagacagcgcgcagtggtcgctggccggcgtcgagcggctggaccatatcggcgggcaactgctgtggcaggcctggaacggcgcgctgccgcagcggctcgatgccagcgagggccagcgccgcgtgttcgagcgcatcgccgcggtgcagaacgaggggtggaagaagcacatggtggaccgcttcaacccgatcacgctgttcggcgccaacgtgctgtcgttcggcgcgcagctgcgcagcggcatcaccatgctgggccagctggccttcgatctgctgcgctttgcgggtgtgccgcagcgcggcccatggcgcgagatctcggccaatatctacaacgtgggctacaaggcgctgggcatcaccgcgctggtcggcttcctgatcggcatcgtgctgtcctacctgtcggccaaccagctgcgcactttcggcgccagcacctttatcgtcaacatcctgggcatggcggtgatccgcgagctgggcccggtgctggcggcgatcctgatcgcggggcgctcgggttcggccatcaccgcgcagatcggcgtgatgcgcgtgaccgaggagctcgacgcgatgcgcgtgatgggcatctcgcacggcttccggctgatcatgccgcgcgtgatcgcgctggccatcgccatgccgctgctggtggcgtggaccgacgtgatggcgctggccggtggcatgctggccgcgcgcatgcagttgggcatcagtgccaccttcttcctgcgcgagctgcccgatgcggtgccggtagccaacctgtggctggggctgggcaagggcgtggtgttcggcatcctgatcgcgctgaccgcatgccacttcgggctgcgcatcaagccaaatacgcaaagcctgggcgaaggcaccaccgcctcggtggtgaccgcgatcaccatcgtgatcctggccgacgcggtcttcgccgtcctgttcaaggacgtgggcctgtgagcgccgcgccagctaccgccacccaggacgggaaggtccaaaaggaccgcaccccggtcatcgaggtgcgcaacctggtcaagcgcttcggcaaggccatggtgcatgaccacgtgaacctggacgtctaccgcgacgaggtgctgtcgatcgtgggcgggtccggcagcggcaagaccgtgctgctgcgccagatcgtggggctggagcggcccacctcgggcagcatcaaggtgttcggcgaggacccgacccggctgcgcccggcgcagctgcaggcgctgcgcaaccgctgggggctgcagttccagcgcggcgcactgttctcggcgctgtcggtgatcgacaatatcgcgctgccgctgcgtgagctgcgcgcgctgcccgacaacctgatctgccaggcggcgctgctcaagctgcaactggtggggctatcagcgcgcgatgccgacaagatgccgtcggacctgtccggcggcatgatcaagcgcgtggcgctggcgcgcgcgctggcgctggagcccgagctgctgttcctggatgagcccaccgccgggctggacccgatggcctcggacgactacgtggcgctgatccgcgaactgcgccgcgaactgggcctgacggtggtgatgatcacgcacgacctggacacgctggtggcgttgtccgaccgcgtcgcggtgctggccgaccacaaggtgatcgccgcggcgccgatccctgaagtggtgaaggtggaccaccccttcatccgcgagtatttcctgggcgagcgcgcccagcgcgccatgcaggcgctgccgccgcacgcgcagccggatgcgccgccccctggagaagcatgatggaaaacaagtcacacgcattccttgccggcgtgttcaccatcgggctggccgtgctggtgctgttcgcgatcttctggttcagcaccgaccacgcggtgcgcgtgccgtatgacctgatcacacgctccaccgtcaacggcctgcagccgcagggcgatgtgaaataccgcgggcttgcggtgggcaaggtcgagtcgatcaagttcgacccgcaggtgccgggccagatcattgtgcgcgtcaacgtcaacaaggacacgccgatcacgcgcaccacctatggcacgctgggcttccagggcgtgaccggaatcgcctacgtgcagctggacgacagcgctacgcacgacggcaccacggcctcgccgccgctgccgacctcgcccaaggcggtggcccgcatcgccatgcgccccggcttcttcgaagagctggaaaaacgcggcgattcgctgctgacacaggtcgagacgatgatggcctcgctcaacgacatgttccagggcgccaaccgcgccgagctgatggccgcgatccgctcggtgcgcaagaccgccgaggactactcgcggttgtccgattcgctgggcccggccgccaaccggctgccgaaggtgaccgagaacctgaacgccacgctggaatcgacccggcgcctgacgcaggagctggccaaccccaacggcacagtgatgcgcaccgtcgacagcgtcgggcgcgacctgcagggcgcggcctcgtcggtgcagtccgcggcgggcaccttcagcgaagagaccctgccgcagctcaatggcctggcccgcgacgcgcgccagaccgcgcgcaccttcgagcgcgccgccggccagttcaacgaaagcccgagcagcgtgctgttcggcgcgcccgcgcccgcgccgggtccgggcgagccgggcttcagcgcgccgtagcgcggcccgcatgccgcccctcacccgataccgccaaccgcgagatgccgccgtgaaccctgcgaccgagatgccacgcttgctccgatccgcgatctcccgcctccaggccgccctgctgctggccgccgcggggctggcgctgtcaggctgcgcgctgacgcgcggcaacgaccccaccgtcacctacgacctcggcccgccggccgccaccacccccggcaacgggaaccctgcgccggcgcggctgcccaaactgcgcgtggcgcagaccgatgggcccaactggctggatggcaacgccctcttctaccggctgcagtatgcgcaggcgcagcgcctgcaggcctacgccacgcagcgctgggtgatgtcgcccacgcgcctgttcgacgagcggctgcgcgaggccgtggccgcgcgcggcacgctgagctggttcggcgacagcagcgtgccggcgctgaaggtggacctgatcgagttcgaccaggtgttcgacagcgccaccaccagcgaaggcgtggtgcggctgcgcgccacggtgttccagcatggcatgctcggccagcagaccttcgaggcacgccggcccgctgccagcgccgatggcgccggcggcgtgaaggccctggccgaggccagcgacgcggtgatcgcggcgctgctcgactggatcggcacgctgcagctaaagtagacacgcaaggagaaatgccatggagccggctcccccgccgccctccgcgccgcccccggcggctcagccaacgccggaagccaccggcccgcagcactcgccgctggcccgagtggggctgatttgcttcacgctgctggtcgtgtacgccagcctgtacccgttctcgggctgggtcgacaacggcgtttcgccgtttgccttcctgagcgcgcccaagccgcgctacatcaccgacttcgacctgctgaccaatgtgctggggtacttcccgttcggtgcgctggtggtgctgtcgctgcatccgcgcatgtcgggcgggcgcgccacgctggtggcgcttgtggccgggacgctgctggcggcctgcatggaggccttccagacctggctgccaagccgcatctcttccaatatcgacctgatcaccaatgcgctgggcgcgctgctgggcggcgcggtggtggcgccgttcacccgggccctgatcgacgacgggcgcctgacgcgcctgcgccatgcgtggttcgagccgcacgccagctttgccatcatcctgctgctgctgtggccgtttgcgcaggtgtttccgcaagagcacctgttcggcatgggcggcatcgtgcgcgaatggctgaccgacccggagtcctggccgatgcaggcgctgcagatggtgttcccgcagcttgaggcctggcaggaccatatcggcctgcggcccgaggacatgcagagccagcagttgctggaatcgctggtgaccgccagcagctgggtcggcaccggcctgttcgcctcgatcgcgatgcgccgcagcgcgccgatgctgcgcatcctggccggcctgctggcggcggcgctgctgctcaaggccaccgcggccgaactgcagtttccgtccgagagcgcttttgtctggctgtccgagggcgggcgctttgccttgctgaccagttcgctggtgctggcgctgctgctgtacctgccgcgctggctgcgcgcggtgctggcgatggtggcactgatcgtgctggtggtgctgaccaatgtgctgccatccaacccctatgcgtggatctcggagcaaggctggcgcatgggccgcttcatccacttcaacagcctggcgcaatggctgggctggctgtggccgttcctggcattctgctatgtgatctggcgcttcgaacaggtcagcctgcgccgccatgccaggaaaaaagccgcggcgcgccgtgaggcggccgcggccggtacgcaggaatagcgctgacggggcctagtgcaactgcccgccttgctcgcgcacatcggcgcgggtcgacaacgccgtcgccaccgccgcgcgcaatcccttcaccagcgtttcctgcgccaggctgggctggcccggatggcgcgccgcctgctcgggcaggtaggggatatggataaagccgccgcgcacgtcgccatccggctgctgcgacagccggtgcatcaacccgtagaagacatggttgcagacgaaggtgccggcggtctgcgacaccgaggccggcacgcccgccgcgcgcatgtcgcgcaccatcgccttgatcggcagcgtggcaaagtaggcggccgggccgcccgcgacgatggcggtatcgatcggctgggcgccggcgttgtcggcaatgcgcgcatcgtcgacattgatcgccacgcgctccaccgacatctcggcgcgcccgccggcctggcccacggcaatcaccagcgcgggccgcagcacgtcgaccagctcgccgatggtatcgatcgccgcgccgaacacgcacggcagctgccgcgccacgatcaccgcgtcgcccacgcgctcgccgtcgagcgcgcgcactgcctcccatgagggattgatcggttcattctcgaacggctcgaagccggtcagcagcacggtacgcatggcgaggctccgcagttacatcaggaagtacagcagcgcgatattggccaccaggatcgccagcgcggtcggcacctgcgcgcggatcacggcgttcttgtcgtcgagttccagcagcgccgccggcacgatattgaagttggccgccatcggcgtcatcagcgtgccgcaatagcccgagaacatgccgatcgccgccatcaccgccggattgccgccgaacatgccgaccaggatcggcacgcccacgccgccggtcatcaccgggaaggccgcgaagccgttgcccatgatcacggtgaacagcgccatgcccacgcaatagaccgccaccgccaccagcttgtagtccatgttgatataggcggtggacaggtgcgccaccgccttgcccacgcccgcgtcggcgaacaccaggcccagcatcgccagcatctgcggcagcaccagcgcccagcccagcgactcggtcagccggcgcgactcgcgcaggccctgcgccacggtgtcgcgcgtgagccagcacaccaccgccagcgagatcaggcagccgatccccagcgagacaaaggtcacgttcttgggatcgagcagcggcacgccggcgatcttgacgtccttgaacagcatggtgccgatcacggtcaccagcgggatcagcagcgccgggatgaacagcctgttgcccaggcggcgcgcgctggcgcggcgttcttcctcgggcaggctgtggtgcttgccgtggccgacgccgccgaagcccgcaatcagcgccatcaccaccgcgccgatgccgaccgcggccggcggcagccggtcgccaatcaggaatacgatcgcgtacagcagccagaacaggccggtgctgaggcggcgcggatgctcgcggtcggcgaaggtcatcagcgcggtgatcgccagcaccaggcccgcgagccagtagagatattcgatggaaatgatcatggcgggctccttactctgcgctcttggcaggtacggcggccgcggcggccttgccgcccagttcgcgctcgagccagcggtccaggcgcttcaggcggacggcgtggatcaggaaggcgcagatcgcggtggggatgccccacacggcaatatgcagcggctcaacgtcgatgttcgacgacagcaggaaggtgtgcatcagcgcgatcgcgccgaaggccacgaagatgtcctcgccaaagaacaggccgacattgtcggtggcggcgcagaacgccagcacgcgctggcgcaccggctcgggcaggtggccgaagcggttctcggccgcgccctcggccatcggcgccagcagcgggcgcaccatctgcgggtgcccgcccaggctggtcaggccgatcgcggcggtcagctcgcgcacgcccaggtagacgatcagcaggcggccaaccgtggccgaggcaatgcgcgcgatccatgcctgcgcatgttcgcgcagcccgtgccgctccagcaggccgatcacggccagcggcagcaggatgatcagcggcaggttgcgcgccttgacgaaggcggtgccgatcgccgagaagatctgcatcagcggcatcggcgcggccagccccgtggccagcgcggcgagcaccaccaccagcatgggattgaagcgcagcacgaagccgacaatgatgacgccgaccccgacaaggggccagagattgactgcctgttccataagagacaccaaacgagtgtgacggaagcgagcggacggcagccgtgtcagcgcacgacagcgccggccgcagtggatgctggcggttgagacggagtgctcagtcgccggcgcggaccgcgatgccttccgcgcccagccgttcccggatgcgccgcgcaaaggccagcgcgtgggcgccgtcgccgtgcagacacacggtttcggcttgaatcggtacccaggtgccgtcgatggcgcgcacgcgtttctcgcgcaccatggtcagggtctggttcagggcgacttcctcgtcctcgtgcagcgcgcccggcgagccgcgcttgaccagcgtgccgtcggggttgtagccgcggtcggcaaagacctcctgcttgacgcgcaggccggcctccctggcgatatcgatcatctggctgccggccaggccgaagaacaccaggtcggcatcgaagtcgcgcaccgcgcgcacgatggcgcgggccagcgccggatcgcgcacggcctggttgtacagcgcgccatgcggcttgacgtgatgcagctcgccgccctgcgcgcgcacgatcgcgtcgagcgctccgatctggtacagcacgtcggcgtagacgtgttccgggtcgcgctgcatctcggtgcggccgaagttctcgcggtccgggtagctcgggtgcgccccgatcgccacgccgcgctccagcgcccacttcaccgtctgcaccatggtggccgcgtcgcccgcgtgccagccgcatgcgatattggccgaactgatcagcgccagcagcgcctcgtcgttggcacagccttcgccaaggtcagcgttcaaatcgatctgcattgccattctcctgtgcggcgcactgcgtcgcccgattgatgttgcgcgtgcgcgcctatgccgccacgcgcgtgcttgcgcgccgccgcgcggcgatgggcatgccatcgccctgccaccgcagcgcctggtcgatctggcgcaggtagcgctccagctcggcctgcgccgcctctgcctgcgccagcgtcacctgcacgaaacgcaccggcgcacccagcggcacctgcgccagccgccacaggtccgcaccgatcaccacgccgatcttggggtagccgccagtggtctgcgcatcggccatcagcgcgatcggctggccgcccggcggcacctgcatcacgcccggcaccacgccatgcgacagcaagtcggcgctgcgctcggcgcgccgcgccagcgcgggcccgttcaggcgcagccccatgcggttgctgttgggcgtgacggtccagtcggcctgccacagcgcggcccgcgaggccgcgtcgaagtcttcatattcaggccccggcagcatccggaccggcgtggccttgcccgcgatgctggcaggcagcgcccacgccggcgcctgcacgccgatccagtcggtctcggccgccagccccgggcgccccgccgtcaggcggtcgccttcctgcagcgcgcgcccgcccagaccgccaaagcctgacttcaggtcggtgctgcgcgagcccatcaccggctcgacctcgatgccgcccgccacgcacaggtacacgcgcgtgccgccgcgcgtcgacggcagcgtcagcgtctcgcccttgtgcacgtcaaaggcatgccacgaccacaccggcacgccgtccaggttggcgccgcattcggcaccagccagcgccacgcgcatatcggcatggaagcgcagcgcggctcggcccagcgtgaattcaatggcggcacagcccggcgcattgccgagcaggcggttgcccacctccaccgccagcatgtccatggccccgcaacggccgacgccaaaacggcgaaagccggtacggcccaggtcctgcaccgaggcaagcgcgccgggacgaatgatttcgatcacgcgatgatttcctcggcaacaaagcgcacggtatcgccgggcgcaaacagggacggcggatcccggtccgccacgaagagctcggcatcggtgcgcccgatcagctgccagccgcccggcagcaccgccggatagatcccggtctgctcgccgccaatgccgaccgacccggccggcaccgccacccgcggctcacgccggcgcggcgtggccagctccggcgccagaccgcccatataggcaaatcccggctggaagcccaggaagtagacgacgtactcgccggcagcatggcggcgcaccacttcccgcggtgtcagcccggtatgggccgccacatcgcccaggtccgggccatgctcgccgccgtagcgcaccgggatctccaccagcttgccggtggcattgcgtgcctcgccggaggcccaggcgagcttcaggttgcgctccagcgcgtccacatcggcgctgccgtcgaagatcacggtcaggttgttcatgcccggcaccacgtccaccaccccgcgccagtcctcggcccgggcagccatcgcccagatccggcgctggacttccagcgatgcggggggagccacgctgtacagcagcgcctgctcggcgagtcggtggacggtgcagttcatgagattcccggtagcgcacttgctaccagtttaggcaggcaagccggaatgtgacgtgtttgtatttcatcgataatttatcgatgaattcataatatcgaaatgagacgaggagaaacagtcaggattgaccctaggggtgcaagggccactgcgaccggctgcaccatggccgggcaccaaagaaaaacggccgggaaatcccggccgtctctgctcgatcagtgtgcagcgctgtcgttcaggcaaacccagcctgatgcgcctgctggtcggcatggtacgaactgcgcaccatcgcgcccaccgcagcgtgggtgaagcccatcttgtaagcctcttcctcgaacatcttgaaggtgtcgggatgcacgtagcgcagcaccggcaagtggtggttcgacggcgccaggtactggccgatggtcagcatgtcgatatcgtgggcgcgcatgtcgcgcatgacttcgaggatttcctcgtcggtctcgcccaggcccaccatcaggccggacttggtcggcacgttggggttgcggcgcttgaattcctgcagcagcttgagcgagtgctcatagtccgcgcccgggcgcgcctgcttgtacagccgcggcacggtttccatgttgtgattcatcacgtccggcgggcaagcctgcaggatgtccagcgccttgtccaggcggccacggaagtcgggcaccagcacttcgatgcgcgtggcgggcgacaactcgcgcgtctgcgagatgcagtcgacatagtgctgggcgccgccgtcgcgcaggtcgtcgcggtcgacgctggtgatcacgacgtagttcagcttgagctgggcgatggtgcgggccaggttgcccggctcgttcacatccagcggatcggggcggccgtggccgacgtcgcagaacgggcagcggcgcgtgcacttgtcgcccatgatcatgaaggtcgcggtgcccttgccgaagcattcaccgatgttggggcagctcgcttcttcgcacaccgtcaccaggttgttggcacgcaagatgtccttgatctcgtagaagcgtgagctgccggtggcggccttgacgcggatccagtccggcttcttgagcttttcggccggcacgatcttgatggggatgcgtgcggtcttgtcggccgacttctgcttgcgggtcgggtcatactgctccgcgggggactgcggggcttcgctggaagtggcgatcagggcgtcgctcatacatttctccgcacgcgctcagcgtgcatttcgcttttgactaggaggccagggccgtctcacccggctgcttcgcttcagccggggcggcagttccttcggcagccagcgcgcgggcttcgtgcgctgccagcacctcgcacaatgctgccgccaggcgcagtgcgatttccggttgttgtgccgcggtcacgggcaagggggcgccgttggcatccgccgccgcgaaggtggcgcctgcgctggccatgtcgactgtttccagcccggcatagccgcagggattgatgcgcaggaacggcgacaggtccatctgcacgttgaggctgacgccgtggtagctgcagccgttgcggatcttgaggccgagcgcggcaatcttggcgccctggtgcggcccgtcggacaaatagatgccgggggcgccgggcttgcgttcggctgcgagattatacgccgcgagcgtgtccagcaccgcctgctcgatgccgtgcaccagttcgcgcaccatcaggcggcggcggcgcagatcgagcagcaaataggccacgacctggccgggaccgtgatatgtgatctgcccgccacgatcgatctgcacgacgggaatccggtcgtccggggcgagcaggtgcgcggggtcgcccgcctggcccagggtgtagaccggcggatgctcgaccagccagacctggtcgggcgtctcgggcgtgcgtgcggcggtgaaggcgcgcatcgcgtcgaaacacggctgatagtcctcgcggccgcgttcgatgacttgaatcggatgcatggcgagagtgtaacgaaaagggccggcttgcgccggccctgcctcggtcacttgtgctgcccgctcagggcgtggtccggcgggaatcgtccgatgcgtcacgcgaccagaccaggcgcagatgcccgcggctgcggtgtgatgcggacgatgccccgccggccttcgcctcaggatgcggtgacctggtcctggttaggcgtccactccgtgcctcgaaccagacggcgcaggctgcgatataccaggtgcggcacatcagccagcgccagcgccgggcggcgggcttccgcgatcagggcgaggcgcaccgggtgcagcgcacgcgggtcaacgctcagcaccacctcgtcacccgagcgcagcagcaggctgccgccacaacgcagccagtagtcctctgaatctttctcgcgggtcagccatacgtcagcgccgcgggcctcttcgacatgcaggcgctgggcagcatgcaccgacagcgtggtgacttcgccaggattcagggtgaacacggtcgttgtgagcacggttttcatggtggttctccgttcagccggcctcggcggggatacgccaaacccagtacgaattcgcggcggggtaccggaactggcccggcaaggggaccaggccagttaaatcctctgaatatcgccgtgaagtaaatgactactgcgggggccggtgatggaatattagtgattgcccggccactatcaaaacgatatattttctttgttcttgttagacaaactcacatacacacgaccgcctggagaccaccatggcatggaagagcgcctgggaaaaggacctgccgcgcggctggcaccgcgagctgccgcgcctgccggcgctgaccgcgctgcgcgccttcgaggccgcggcgcggcacgagagcttttcgcgcgcggccacggagctgtttgtcacgcacggcgcggtcagccaccagatccgcgcgctggaagacgaactgggcatgccgctgttcgagcgccacggcaagcgtgtcgcgctgacgccgtcggggcgcctctatgccgagcgcgtgcgtgacgcgctgctgcagatcgccgatgccacgcgcgcgctgcaggccggcaaccgcgacaagcgcctgaccatcagcaccatgccgtcgtttgccgcgcgctggctgacgccgcgcatcggcagctttatcgagcgccacccggagctggatgtcgagctgctgtcgtcgaacacgctggtcaactttgcgcatgaggaagtcgatatcgcgctgcgcatgggcagcggcgactatcccggcctgtatgtggagcggctgctggacgacgtcttcttcccggtctgcagccccggcttcaatggcggccgcctgcccgagcggccgcaggacatggcggggctgccgctgctgcgcggcgagggcgatccgtggaagccgtggttcgaggccgccgggctggactggcccgagccgcgcaagggcctgctgctggaagattcctcgctgctgctgcaggccgcgtccgaaggccagggcattgcgctgatccgctcctcgctggcctacaacgacctgctggccgggcgcgtggtgcggctgttcgatgtcagcatcccctgtccatggctgctgtacttcgtatgcgccccgggctcattgaacctgcccaaggtgcaggcgttccgcggctggctgctgcccgagatcgagcgcttccgcgaggtgctggcgcagtgggagtgaactagtcttccgacgcttcgccggagtcagcaggatcggcggctgcgtccgccgccggcctggcgcgcgcccggccggcccgcggatgggccttgtcgtagaccttcgccagatgctggaaatcgagcgcggtatagacctgcgtggtcgaaatgctggcatggcccagcatctcctgcaccgcgcgcaggtcccccgacgactgcagcacgtgggtggcaaatgagtgcctcagcatatggggatgcacatcggccggcacgccggcgcgcagcgcctgttgcttgagccgcaactgcaccgtgcgcatcgacaggcgccgcccgcgcgggccgaggaacaaggcgtgggcatcttccggcaaggcgcctgggcgcagcagcgtgtcgcgcaccgccagccaggcacgcagcgcctcgatggccttgctgccgaccggcaccgagcgctggcgcgaacccttgccggtcacggtgacttccgctccggccaggtcgagccagccgctggagcggtagccgtcggcatcggcatagcgcaggtccagctgcaccagctcggacagccgcagcccgcttgaatagaacagctcatggaccgcttggtcgcgcagtgcctgggcatccgtgccggcaggatgcgcgaccagtgccaccgcatgttcgaccgacaaggccttgggcagtgcgtggccagagcgcggcgcgcgcacgccgtcgaccgggttcaccgtgacgccatggccgtggcgcgccgcccactggaagaaaccgcgccaggccgacaaggtgcgcgcgatgctggtgccgaccagcccggcgccatgcagccgcgcggcaaagttgcggatatggtgggtctgcagtgccagcagggccacgccgggtgcataacgcgccgcgtgcccctgcagcacgcgcaggtcgcggctgtagctggtcagcgtgtgctcggccagcttgcggctgccgcgcagccagtccaggtagcgtgtgaccagcggctcgggtgccggcggcgggccgtcgctggcaggagcgatatccgcaaccacgctgcggggcggccggcgtgcagtcatggcgtcaggcgtgggccgccgcgcctcagtcgcgcagccggtgcagcgcggcgccggcgacttcgccgatctgcgacaggtaggcggtgcccatgccttcgtggaaacggcgcggatcgggcgagcccagcaccagcaggccaaaggctgcgccgcgcacgtcggcaccggcctcggcatcgccggcacgcaccggcacgcgcagcgtcaccatcgccagcgaggtgatatcgtcgcgctccagcagccccgcggcctcgaagccgccgttgctgccgcagtacggcgcacgcaggccttcggcaaagatgcgcaggtcttcgctggcgccctgcgccacttccatatggacgtattgctcggcgacatcccacagcctgagcgccaccgccggcacatcgaacacctgctgcaggccgtcctgcactgcatagggcagcgcgtgcgaatcggcttcggccagcaggcgcagctgccaggcatgcatgcgttgctgggtgcggtcgttgtcatggccgtggcggaccaggtccgccaggcgcagctccaggcccttgttcttctcgcgcaggatttccatctggcgttcctgcagcgacacggcgcggtggctgtgcgggctggtcagctgcaccgcggccagcagctcggcgtgttcttcgaagaattcggggtggctctgcaggtaggcggcaacgtcttgggcgttcatggggcgtggaccggtagaggtaaagtgggtggcagtttagcaaaggggaccggcggcacagccgcggccccctttttacgcaggctgcgctacgtctggatcagccgcttctgccgcgaaatgctcatcagaatgccgatgcccgcgcccagcgtcaccagtgcggtgccgccatagctcatcagcggcagcggcacgcccaccaccggcaggatgccgctgaccatgcccatgttgacgaaggcataggtgaagaagatcagcgtgatcgatcccgccagcagccgcgagaacagcgtcggcgcattggccgcgataaacaggccgcgaaagatcagcagcaggtacagcaccagcagcaccgcattgccgatcaggccgaactcttccgagtacaccgcgaagataaagtcggtgtgcttttccgggatgaattccaggtgcgtctgcgtgcccttgagccagcccttgccctcgaccccgccggagccgatggcgatgatcgactggatcgtgtggaagcccttgccgagcggatcgctggtcgggtccagcagcgtgcagacgcggtgctgctggtagtcgtgcagcaccggccagttcacgcccggcgcgcacatatcgttctggaacgtgatcagcagcgtgatcgccaccaccagcagccccagcagcggcaggatcagccgccacgacaggccggcgaagtagatcacgtacacgcccgcggccatcaccagcagtgccgtgcccaggtcaggctgcttggcgatcaggccgaccgggatcagcagcagccccagcgccaccacgaagtcgaaccacttgatcacgccctcgcgcttctggaaataccaggccagcatcagcggcatcgagatcttcatgatctcggacggctggatcaccatgccgacatagagccagcggcgcgcgcccttgcggatcaggccgaacatggccaccgcgatcagcagcgccactccgaccgtgtagatcggcaccgccacccgcatcagcgtctgcgtaggcaggtaggcgatcacgatcatcaccacataagacagcaggatattgcgcagctgatcctcaacccggcccggcatgtcgatggcggccgagtacagcgccacgatgccagtggcgaacagcaggaagacgatcagcgagagtggtttgtcaaaaccggtcagcgcggtcttgatcagggacaggacgcggcgtcgatccatgcgcgtctccttcagcgagtggcgtcggcaccgctggctgccttggcagccacgggcttgacgcgtggtttgggcgcgggcgccttggccggcacgaccggcgcggaagccggcggcggcaccttcggcttgctgtggcccagcgcctgcagcatgcgttcatccagcgtctgcacggccgaggccggtgcgatcgcggccgggtccagcgccgccgcgatcgcgtcagacgccccggcatgcgcgcccgacgccgcggcgacctcgctggcggccgcgccgctggccggcgcgctgccgctcgacatcaccgtggcgctggcaatgctggcggtctggccggtggtgaacacgctcggcgttgccaccggcgggcggcccgccatgcgctcggcttccggcggcgcgatggcttccagctccgccggccatttgccggtcaggtagtagtccatcaccttgcgcgcgatcggcgcggccaccgcggcgccgaagccggcgttctcgacgatcagcgcaatcgcgatcctggggttgtccgcgggcgcgaaggccgtgtacagcgagtggtcgcgcttgcgctcgtccagcgcgtggtggttgtacttctcgcccttggccaggctgtaggtctgcgccgtgccggtcttgcccgccgattcgtaggcggcgccggcgaacacgcgcgcggccgtgccggaatgcgtcaccgccaccatggcgcgcttgatcacgttgatgtcggcctgcttgagcgggatcgtgtagctttccttgggcacggtcagcgtgcgcttgcgcgtgaccgcatcctccacggccttgaccaggtggggcttcatcaccttgccgtcgttgacgatgaccgaggtggcctgcgcaagctgcaggatggtgaagctgttgtagccctggccgatgcccagcgagatggtctcgccgtcgtaccacttctgctgctcgggcttgcggtacgccttgcgcttccagtcggtcgacggcaggatgccgcggctttcgccctcgatgtcgatgcccgtgatctggccgaagcccagcggcttcatgaagtcatggatgccgttgacgcccatgtcgcgcgccagcgcgtagtagtaggtgtcgcacgaatgcacgatcgagctgtgcatgtcgacccagccatggccgcccggcttgtcgtcgcggaaggtatggttgcccagcgtgaagaagccggggtcggacatgccccaggccgcggtgcgcttgccggtggtcagcgcggccagcgccatgaacggcttgtaggtcgagcccggcgggtaggtgccgcgcagcgggcggttcagcagtggcttgtcgggcgagttgttgagctcgttccaggtattggtgtcgatgccctcgacgaacaggttggggtcgtaggtcggcttggagacaaaggccaggatgtcgccggtggacggctcgatcgccaccagtgcgccgcggcggttgccgtagagtgcctcggccagctgctgcaggcggatgtccagcgacaggatcaggttgttgccaggcgtggcgggtgaggtcgaaagcgtgcggatggggcgcccgcccgcgctcacttccacttcctcgaagccggtcaggccgtgcagctcgctctcgtagctctgctccaggccgatcttgccgatgtagttggtgcccttgtagttgtcggcgtccttgcgcggatcgtatttggcgccgtcggcatcgttggcctcgtccatggcctcgatgcgttcctggtcgcgctgcgagatgcggcccaggtagccgatcacgtgcgaagccgactcgcccagcgggtactgccggaacagccgcgcgcgcacatccacgcccgggaagcggaagcgctgcgcggagaagcgcgccacttcctcgtcgctcagctggctgcggatcggcaggctttcaaagctgcgcgactcttccatcagccgcttgaagcggcgccggtcgcgcggctggatatccaccagcgccgacaggccttcgatggtgttgtccagcgtatcgcccagcttggacggcgtgatctccagcgtgtacgcggaataattgcgcgccagcacgatcccgttgcggtccatgatgatgccgcggttgggctcgatcggcgccaccgagatgcgattgtcctcggccttggccgagtactggtcatgcttgtaccactgcagccacaggaagcgcgtgaacagcaggccaaagcagatcaccgtgaacagggccgcggccgccacgcggatgcggaagcggccgatttccagttcgacgttgcggatttcggtcatggtactgcgttggccagggatgagcgtttaggtgcggtcaggtgcgtgcggcgtcagatcggacgcgtctcgtcgacatcgctcgaacggcgctgcggcgccagcagcaggctggtggccagcggccacagcagcgcctcgatcgccggtgccagcagcagttgccagcccggcagcggcgcgcccatggccagccggatcagcaccggcaccgcgtgcacgacgaacagcagcggcagcacgtgcagcgcctgggtatagacggtgaaccacagcacgcggcggtggatggtgatggcgaagtaggccagcagagtgtaggccagtgcgtgctcgcccagcagccgggcatcgtgcacgtccatcagcaggcccagcaggaaggccacgcccatgcccaccttgcgcggctggtggatgttccagaacaccagcaccagcgccaccatgtcggggacccacagcgtggtgccccagggcatcaggttgaacaggaacgccagcacgaagctgaaggcgataaaggcgggattgaccggccgcagcaggtattggggattggtcaccgtggtgcctccttggcgggtgcggccttggcagccgctgcgctatcggcggcagcgcgtgccgcagcggacttggcgcccttgaccggcgcctccggcttggcctcgaccgtttcccgcgcgggaatggccgcgtcgtagcgcaccaccagcagcaggcggtgcgcgcgcacgccggccaccggctcgcagtacacgcgcgaaaacgcggtatcggccttgcgctcgatatggacgatctttgccaccggcaggcccggcgggtaggtgccgtccaggcccgaggtcaccagcaggtcgccctgctgcaggtcggcggcggcggccatgaagcgcaggtccagctggcccgcgcgcgcgccgccgaaggccacgctgcgcagcccgttgcgcaccacctgcacggggatggcctggtccttgtcggtgagcagcgtcacctcggactggaacggcgacacgcgcgtgacctgccccaccacgccgcgctcgtcgatcaccgggtagccggcgcgcaggccgtgctggctgcccttgtcgatcacgatacgctgggtgtagggatcgcgcgcgtcatacaggatctcggcggccgtcaccggcgtggccgactgctgcgccagcccgagcagcttgcgcagctggttgttctcggactccagctgcgcctggcgcaccgaggcctgggcctgctgcacggcgttctggcgcagttcgcggttttcggtggcgagcatcgccgacgactgcgcatagtcgaacatcgtgcgcagtgcgtcgcgcggcgtcagcaccaggcgttcgaccggcatcagcacggtggcggcaacctgccggcccacgctgagcgcgtcgaaacgggcatcgaccaccagcagcgccagcgcgatacccacgtacaggaccagcctggcgacagccgaggtgccttgcttgaagagcggcggaggggagtaatccatttacccgaacaaaggccaaagcccacgcggaaacgccccgccgcccgccgtgccgcgcccgggtcccttgcggggacgggagcggcacggccgggcggcgggaactgccagggcccggccccggcggatgaggcgccgcgacgccgccctgatcgctggatccggcaggccgcgcatcgccacgtgagcgtccttcttactcgtaggagaagatgctgccgagcttgtccatgcgttccagcgccatgccggaaccgcgcaccacgcaggtcagcgggtcttcggccaccagcaccggcaggccggtttcttccgccagcaggcggtccaggtcgcgcagcagcgcgccgccgccggtcagcatcatgccgcgctcggcgatgtcggcgcccagttcgggcggggtctgttccagcgcgatcttcaccgccgaaacgatctggttcagcggatcggtaagggcttcgaggatttcattggacgacacggtgaaggcgcgcgggatgccttcggacagattgcggcccttgacttccatctcgcggacttcggagcccgggaaggccgagccgatttccttcttgatcgcttcggcggtctgttcgccgatcagcatgccgtagttgcggcggatgtagttgacgatggcctcgtcgaacttgtcgccgcccacgcgcaccgaacccttgtagaccatgccacccagcgagatgatgcccacctcagtggtgccgccgccgatatccaccaccatcgagcccgacggctcggacaccggcaggccggcgccgatcgcagccgacatcggctcctcgatcaggtagacctggctggcaccggcgcccagcgccgattcgcggatggcgcggcgctcgacctgggtcgagccgcacggcacgcagatgatgatgcgcgggctcgggcgcagcagcttgctgtcgtgcaccatcttgatgaattgcttgagcatctgctcggtgacggtgaagtcggcgatcacgccgtccttcatcgggcggatcgcctcgatattgcccggcaccttgcccagcatctgcttggcttccttgcccaccgccgtgatggtcttcttggcgttggggccgccttcctggcggatcgcgacgaccgagggctcgtccagcacgatgcccttgtcgcgcatgtagatcagcgtgttggcggtgccgaggtcgatcgccaggtcgttggagaagtagctgcggagaaatccgaacatcaggaatcctgtctgtggtggtgttcgcgggtaggcgaagcggccggcaccgcgaacggcccggccacgaaatacgttgtgttgaatacggaatggttcccggcttcccggtccgcccgccgtccggcacggggctgcccgggccgggatggaatgggaacggcaatcgccggcgcaccgcgcgcgccggccctacgggaacctttgattagaccccgcggaaaagttcgcggaaatgtgcaggcaccggcgcaccatatcgaatcactgcgacatgcgctggccggctgcagaggcctaatcagaggacccaggtccgcccttcgggcgcctgcggatgccaggcgcaagcgcgccggcctgcggccatgtggcgtaagcgttgccaagggtcggtaactcgcaatgataccttataattcctgctgcttcgggcgtttacagcctgaaaatacctgtaattccgacgactccggggcgccactccggcgcccccggtcaggccacgggccgtgcgacgcagccgccccatgagccagccgccggcgcagcccgcgcccccgcatccgagcatccgaaccaccacgccatggccctcgctctatccgacgtcaagcgcatcgcccacctggcccgcatcgaaatcagcgatgacgaggccgcccagacgcttgcgcagctgaacaactttttctcgctggtcgagcagatgcaggcggtcgacaccagcggcatcgagccgctggcccacccgctgtcagccgtgcgcgacatggtccagcgcctgcgcgaggacgtggtcaccgaatccgaccgccgcgccgactaccagcgccccgcgccggccaccgaagacggcctgtacctggtgcccaaggtcatcgaatgaccgccgcccggcccggacccgacgcacccgtgcatgcctgtccggcgccggccatccgccagtacgccaccccctgatgccaaccgactgtcatgcccttttccgctgattccgtgacctccctgcgccagctagccgatgcgctggccgcgcgctccgtctccgccgaggaactcgcacgcgagtacctggcccgcatcgagcaggccgccgcgctcaacgcgtttatccacgtcgatgccgagcggaccctggcgcaggcgcgcgccgccgatgaacgccgcgcccgcggcgaggccgcgccgctgaccggcgtgccgatcgcgcacaaggacgtgttcgtcacgcgcggctggcgtgccaccgccggctcgaagatgctggccaactatgaaagcccgttcgacgccaccgtggtcgaacgcatggccgcggccggcatggtcacgctgggcaagaccaatatggacgagttcgcgatgggctcgtccaacgagaactcgcatttcggcccggtgcgcaacccctgggacaccagccgcgtgcccggcggctcgtcgggcggctcggccgcggccgtggccgccggcctggcccccgccgccaccggcaccgacaccggcggctcgatccgccagccgtcgtcgttctcgggcatcaccggcatcaagccgacctacggccgcgtgtcgcgctacggcatgatcgccttcgcctcgtcgctggaccaggccggcccgatggcccatagcgccgaagactgcgcgctgctgctcaacgccatggccggcttcgaccccagggactccaccagcatcacgcccgcgcagggcggcgtggacgaggactacacccgcctgctgggccagccgcgcgccggcgccactaccgagcgcccgctcgccggcctgcgcatcggcctgccgaaggaatacttcggcaagggcctgtcggccgacgtcgagcaggccgtgcgcgccgcgctggccgagtatgaaaagctgggcgccacgctggtcgaggtgacgctgccaaagaccgagctgtcgatcccggtgtactacgtgatcgcgccggccgaggcctcgtccaacctgtcgcgctttgacggcgtgcgctacggccaccgcgcggccgaataccgcgacctgctcgacatgtacaagaagagccgcgccgaaggcttcggcgccgaggtcaagcgccgcatcatggtcggcacctatgtgctgtcgcatggctactacgacgcctactacctgcaggcgcagaagatccgccgcatcatcgccgacgacttccagcgtgccttcgcccagtgcgacgtgatcatggggccggtggcgccgacggtggcgtggaaactgggcgagaagacctcggacccggtgcagatgtacctggccgatatcttcacgctgtcgaccagcctggccggcctgcccggcatgagcgtgccgtgcggctttggcgaggccggcatgccggtgggcctgcagctgatcggcaactacttcgacgaggcgcgcctgctgcagaccgcgcacgcgttccagcaggcgaccgactggcacctgcgccgtccgggcaaggcatgaacatgaccgcgcgctcctcgctgaccctgcgcctgatggccgcggccgcgctcgccgcggcggtggccggctgcatcccgctgccgggcgggctgggccggcccgctccaatcgccagccgcgacatcgacctggccggcgactgccgccgcaccgaggaagacggcttccgcgaagacgcccagctgcgcgtgtcggacaacagcgtgcagcagctgtcgtggaagctgtgggtaggcaagcgcggctcgtgcagcttcaacctggcggacttccgccaggtccagaagaagccgcatatcgagctgcgcgccaatgacggcagcggctgcaagctgatggtctggcaggacccgcgccgcgttacgctggcgcacgccaactgccagcagcgctgcacccccggcgtctacgaagaagcctggcccgtgatgttcgagccgggcagcggcgcctgcgcccgcacgcgctgaagccaccgaagccggccatgacccacgcacccgccaccccgcaacgctcaccgcgcaccgcccgtccggcggtggcggtgctgcgcgccgcggtggcactggggctgggcgcatggctggccggcgcatccgcgcatacaccggaactgcccgcgcccgcgctggcgcagccggcgccgctgacgcccgccggcgtgctggcgccgaatgcggtgagccgggccgcgccaggatccgcggccacggcacccgtgccggcgcagcgtgtccagctgcgcggcgatgcggccacgcccgcgctcaccgcctactggttcctgccgcgcgagggcgccaccccgcgcgcgctgccggtggtggtggcgttgcacggctgcggcggcctgctgtccgcgcgccccgcgcgcgcgagcgcggcgggtgccgccggaaccgcccaggcggacgtttccggactgctgcagcaacgctaccgcgaatacgcgcactggctgaacgagcgcggctatgccgtgctgatgcccgacagcttcagcgcgcgcggcaggccccacggcatctgctccgaacccatcgacgcgcgcggcatcgacgaccgcacgcgccgcgccgatgcgctggccgcgctgcgctgggtggcgcagcagccggcggtcgacaccgcgcgtatcgtgctgctgggctggtccaacggcgcgcaggcggtgctggccaccgtcgatgccagccgcccgtggccggccggcacgccccaggtggagcgtgcggtggcgttctacccgggctgcaggcgcgccgtgcagcagcacaacttccgcctgcgcgcgcctatgctgctgatgatcggcggcgccgacgactggacgcccgccacccgctgcgccatgctgcaaagcgcggtgctggcgcgccagccgggcgcgcgcttccggctggagatctaccccggcgcctatcacggctttgacggcaccagcgagctgcatatgcgccgcgacgtaccggcgggcatgcgcaagacccagggcgtcaccgtcggcggcgatgcggtggcccgcgtggccgcgctggcccagctcgactcatggcttgccagccccgacccctgagggccggggcaagaccagactgaaccccggggcggctgcgccgctccaccgcaacagacagaaccgaaagaaccgaacaggaataccgccatgcaatgggaagtggtgatcggcctcgaaacgcacgctcagctttcgacggcctccaagattttttccggcacctccaccgccttcggggccgaggccaacacgcaggcctcgccggtggacctggcgctgccgggcgtgctgccggtgctcaacaagggcgcggtcgagcgcgccatccagttcggcctggcgatcggcgccaccatttcgccgcgcagcgtctttgcgcgcaagaactacttctaccccgacctgcccaagggctaccagatcagccagtatgagatcccggtggtacagggcggcaccatcaccatccaggtcgaaggcaggaagggcgagttctacgaaaagaccgtcaacctgacccgcgcccacctggaagaagacgcgggcaagtccctgcacgaagacttcgccggcatgaccggcatcgacctgaaccgcgccggcaccccgctgctggaaatcgtcaccgagcccgacatgcgcagcgccgccgaagccgtggcctatgccaaggcgctgcactcgctggtggtgtggctgggcatctgcgatggcaacatgcaggaaggcagcttccgctgcgacgccaacgtgtcggtgcgcccgctcggccagaaggaattcggcacccgccgcgaaatcaagaacctgaattcgttccgcttcctgcagcaggccatcgagtacgaagtgcagtggcagatcgccgagatcgaggacggccgcaagatccagcaggccaccgtgctgttcgacccggaaacgggcgaaacgcgcgccatgcgcaccaaggaagacgcgcacgattaccgctacttcccagaccccgacctgatgccgctggaaatcgacgcgagctgggtcgagcgcgtgcgcggcgagctgccggaactgccggtggcgatgcaggcgcgctttgtctcgcagtacggcctgtcggcctatgacgccaccacgctgaccgcgaccaaggccttcgccgcctactacgaggccgtggtggccgacgccggcgccgccaacgccaagcccgcggccaactggctgatgggcgacgtggcctcgcagctgaaccgcgaaggcatcgccatcgacgccgcaccggtcacgccggcgcaactggccaggctgctcgcgcgcatcgccgacggcacggtatcgaacaacaccgccaagaaggacgtgttcccggcgatgtgggccggcgagcacggcggcgatgccgacgccatcatcgcggccaagggcctgaagcagatgtccgacaccggcgagctggagaagatcatcgacgacgtgctggctgccaacgccaggtcggtcgaggaattccgcgcgggcaaggagaaggcgttcaatgcgctggtcgggcaggcgatgaaggcgaccaagggcaaggccaatccggcgcaggtgaatgagctgctgaagaagaagctggggtaagggctggctgacagggccagcgaaccgctgcggcaggcgtatcctactggcctgctctaaaagtcaggagatcccccatgagctggtccgcccaccaatacgtcgccttcgaagacgaacgcacccgcccggtccgcgacctggtggctgccatccccaatgagatcgcgcgcagcgcggtggatatcggctgcgggccgggcaactccaccgaggtgctgctggcgcgctatacgggggcgtcggtgaccgggctggacagctcgcaggacatggtcgatgcggcgcgcaagcgcctgcccgcggtgcagttccgcgtggccgacatcggcgcctgggacgaggccgggccctatgacgtgatcctggccaatgccgtgctgcagtggctgcctgaccacgccagcctgttcccggcactggtatccaggctcgctcccggcggcacgctggccgtgcagatgccggacaacctggaagaacccgcgcaccggctgatgcgccaggtggcgacggaaagcccgtgggcagaaaagctcgccggcgccagcaaggcccgcgccgagcgtgccccggcgcagtggtactacgagctgttgcgcccgctgtgccagcgcgtggacgtatggctgaccacgtaccaccatccgctggcggacggcccggccgcggtggtggagtggttcaagggcagcggcctgcgccccttcctgcaaccgctggacgaggccgagcgcgccgcctacctggcgcgctaccagaccgagattgccaaggcgtacccggcgctgccggacgggtcggtgctgctgccgttcccgcgcctgtttatcgtcgcgacgcgctgaggccagccctacgccggcttgtggcacaccgcttcgatgttgtgcccgtccggatccagcacgaaggcgccgtagtagttggggtggtagtgcgcgcggatgcccggcgcgccgttgtcgcgcccgcccgcggccagcgccgcgcgatggaaggcatcgacggtctcgcggctgtccacgcggaaggccacatgcagcggcggctggttgggcgtgccgcggtggatccagaagtcgggttgccccggtgggccgaagcctgcgacatcggtgctgccggtgacgctggccgggaattccttgtccagcacatagccgatggcgcccagcgccgcctggtagaaggcgcggctcttgccgtagtcactgacgcttacgccggtgtggtcgatcatggatcgcttcctttcaacggtgggagggggctcaggccaggtccagcacgctcatggtggcgttcaggcggctgaccagcaccgattcaccgtggacgtcggcgaagacatccgcctccaccacgatgatcgaacggccggacttgagcacatcggcacggcagcgcagccgttcgctgcgcacggccctgagcaggttgatcttgaactccgcggtgaccacgtgctggcctgcctccaggatggtggatgccgccgcgcccgcggtgtggtccgcgatggtggcctgcacgcccgcatggacgatgccgccgtgctgcaggtggcgcggcgcaatggccagcgtggattcgcaccagccgggcccgcagtccgccagcgtgatgccgacatcgttgacaaaggcggcctggcgaaagcccgcctcgatggtgtcgcgcagcagaagccgttcctgttcggtggtcatggctgttccttgtcgggtcactgcatcaccgggatgtgcgcattgcagcgtgaaggcgcggggctgtcaaccatccatgcgcctgttacgccgcgcggaagcgggccggcgtgccgtcgcctacactggaagcatccgcgacccgagtgcgcgcctgagcgcatgcagcccgcaatgatcgccgacacccatccccccccactgcgccgcaagacgcggcccgccgcggcctttgccgcgctgacgcaggcaagcctggcgcgcatcgaagcgagcctggcccagttgctgcgccgcgacgagcccgaagacctgcacgcgctgcgcgtggcggtgcgccatgcgcgcgcggtgctctgggccctggggccgtcgttgccgcggcaggagcgcgatcgctggaagcatgacctgcgcatgctggcgcgcgccaccagcgacgtgcgcgactgggacgtattcctggccgaaaccattgccccggcacgcaaactggaaccggacgataccgtgctgtcggccatcgccgacaccgcccgagagcgccgcgacaccgcacggcaaaccatgctggcggccctggccggttaccgtgactggccgctgccagcgctgcatcgcgacctggcgcacctggcccagctggccgcccgcgcccgcaatggcggtggccgcctcgggccctttgcgcgcaagcgcgtgcgccgcggccgcaagcgcctgcgcgcgctggcaaaggccgcacgccgcggcgatccccgcgcggtgcatgagcagcgcatcgccggcaagcgactgcgctatgtgatcgaggcattcgagccggtgctgccatcccgctacaccagggacctgcatcgcaagctggtcaaagggcaggcaaagctcggccgccttgtcgacggcatcgtcgcgcgccggctgctggccgattgcctgcaggcgcaggcaatgccggacgaggcgccgccgcgcccgctgcccggtgccagctgaccacccgcccgccatggcggcctgcccaccgcgtgccacgccaaccgcacccgatctgcgacaatagcgccatgactgctccccaggttcccattgccgccatcgccaccgcgcccggacgcggcggcatcggcgtggtgcgcgtgtcgggccccgatgttggccccgtgatgcgctccgtctgcggccaggcactgaagccgcgccacgccacctacctgccgttcctcgatggccatggcaaggtcatcgaccacggcctggcgctgtatttcccggcgcccaattcctataccggcgaggaagtgctcgagctgcagggccacggcgggccggtggtgatgcagatgctgctgacacgctgcctgcaagcgggcgacggcatcggcctgcgcctggcagagcccggcgagttcacgcggcgcgccttcctcaacgacaagctcgacctggcccaggccgaggccgtggccgacctgatcgaagccagcaccgaggccgcggcgcgctcggcggcgcgttcaatggagggcgaattctccaacgccatccgccagcttgtggacaaggtcatccacctgcgcatgctggtcgaagccacgctggacttccccgaagaagagatcgatttcctggagcagtccgacgcgcgcggccagcttgccaccatccgcaccgaactgagcggcgtgctggcgcaggcgcgccagggcgcgctgctgcgcgagggcctgtcggtggtgctggcgggccagcccaacgtgggcaagtcgtcgctgctgaacgcgctggccggcgcggagctggccatcgtcacgcccatcgccggcaccacgcgcgaccgcgtgcgcgagaccatccagatcgacggcatcccgctgcatatcatcgacaccgccggcctgcgcgagcatgccgccgacgaagtcgagcgcatcggcatcgaacgcacctgggacgccatccgccgcgccgacatcgtgctgcacctggtcgacgccaccgactacctgcgccatggcctgtcagagactgacgacgccatcgacgaccagctcagcggccagctgccgccgggctcgccgatcgtgcgcatcgtcaacaagatcgacaaggcgcccgcggttggcgatgtcgtcttcggcggcaaccgcccgcacgtggtcgccgccaacggccccaacccgaccgagatctggatctcggcgcgcaccggggccggcattgaactgctgcgccgtgagctgctgcggctggtgggctggcagtcgggcaatgaaggcaacttcctggcgcgcgagcggcacctgacggcgctgcggaatgcgcaatcgcacctggatatcgccgccgagcaggccgagcaccaggcgcaggcgctggacctgtttgccgaagaactgcggctggcacaggattgcctgaacagcattacgggtgagttcaccagtgatgatctgctggggacgatctttacgcggttttgcatcggaaaataaggcgcagcgcctgacctcaatccaggctcagctgcgatgtcttgatggtttcgctccagcgcaagcgttccgccgtgacaaaggcggcgaatctctcctgtgcctgtccgcctggaataccgcccatccggctgatttcggtaaccacgtccggggcgcgcaggaccgcgaccaggtgctcatgcagcctggctgcgatctccggcggcgtgccggctttcacaaagatgccgatccacgccgtcgacaagaggttgcccaccccggtttcctccatggtcggcacctcgggcaggctggggattcgccgtgccgacgtcacggcgagcgggcgcagcttgccggcccggatatgcggcagggcctgggtcaggttgtcgaactggaaagtcgtttcaccggccagcagcgcggtggtcgccggcgtggaaccgcgatagggaacgtgaatggcatccgttcccgtgcgctgcttgagcagttcgccggtcaggtggctggtctggccgatgccggaggagccgaaggacagctttcccgcctgcgccctcatttgcgcgaccaggtcggcggcgctccggatcggcgactgtgcgttgacgaccaggacgctgggaaaagagatgacatcggtaatccccaccaggtcgtccggcttgtatggcagggtcttgtaggcgctgtagttgatggcctgcggcccgacattcccggccaggagcgtgtagccgtcggcgggcgcgcgtagcgccgcctgtgtgccgatgatgcccccgctgccgggccggttgtccacgatgacaggctggccaaggcgaaggctcagtttctgcgcgagcatgcggatgggaatatcgatcgtgccccctgccgcgcccggcacgatgatggtaaccggccgcgcaggccacgccgcgcccgtttgcgcggacacagccggggccgccatcattgcgcccagggcagcggcaagtgcgagcgccaggcgcctggtactgcggagtgcttgcatggcattgcctctttcttctcagtgttgtcctgttcacgcctgcgagcgatggccggcatcgacaaagcgcccgagatgcgccgaggcattgccgagcagtgcatcgttggccatcaggcgcttgctgtagtgactgatcggggtttcgtcctgcatgccgatcgccccatgcagttgcagggcgtcaagcgcaagcacacggctggcatggccaaccatgtacttggcggcgctgacgcggcgcgagcgctcggccggcggcaccagggaccagcctgcaacggcttcgcgcaccagctggcgtgcggcatgccagccgcgatagtggtcggccacccgatgctgaagcacttgctgctctgaaagggtgcggccgaactgcttgcgcatgcgcatgtactcaaccgtgagggcaagcgatcgccgcatggccccgatgctttccgcgcagagggcgagggtggcaagttccagcgcgtcgtccagcaacgccgtggcgtggtccgcgccgcagagcagcgcggacgcaggcagttcgacgttgtcgaagcgaatgtccgccgcgctgcgcccgtcgtggagctgataggcacgcaggccgacaccggccgcctggctcggcacatcgaacagcgccagcccgccttcaggcaggcaagccgtaacaaacagatgctgcgcctgggcggcgcccatcaccagccggttgacgccgtgcaggcgccagtgcgcgccatcccggcgcgcaacggtttcaggatggtggacgtcgcggcgggactggccctcgcgataagccagcgcgcagcgggcctggccgctggccagcgctgcgagcagcggttcgcgtccttctgcgttctccgcgccaagcagcacctgcgtgccgaggaccgcgctccagagcatgggctccaccaccagggcctcgccgagcgcttccagcaatggcatgaggtcggacagggtgccgcccaggccgccgtcgcactccgggatcagcaggccggtcaggcccagctcggcaagggcagcccatgcggcagggtcgaagccgtccctggcagccacggcctcgcgcctgcgctcgaagccgtagtgcttgtccagccagcggcgcagggtgccgtccatgatcgcctgctgctcgtccatctggtcctggcgggggcggtcgatctcggtcagtccgccgaacacagccttggcaacgatctggcgttgtatctccgacgagcccccggccagcgtgatgccacggtagcgccagtagtgcagcggaaaattctcggcatggccaggagatagcggctccggactgggctcgccatcgatcgcgcggggatcgaagggcaatgttcgggcgcccaacgcatccagcttgaacgtgtgcaggtcctgcagcagcaggttgccatcgagcttgagcagcgaggcttccagctcaggactgccgccctgctcagcaaaccgcactgccggccaccacgcggcttcgagcgcgcgcatgcgaatgtccagctcggcatgccggcgcgccagcaaggcatcgtcgatctgcgcgccggggcccgggcgccatttgccggccagtttcgcgacgctggccagctccgccttgcagtctcccacccgggcgacgaacaggcgctcgatcaccagcagtcccttggcgatggaccagccggcgtgttccacgcccaccaggttggccgcgggcacccgcacgtcgtcgaagaacatctgcacgtggaagtgcgcgccgttgataaagcggatcggccgcaccgtcacgcccggtgtgcgcaggtccatcagcagcaccgagatgccctcttgcttgcgtcgggcagacggatcggtgcggaccagcaccagtgcccagttggcccactggcccagggtctgccagatcttgctgccgttgacgacccattcgtcgccatcgcggcgcgcaacggtgcgcaaagacgctaggtcggacccggcgtcgggctcggaatagccttgcgcccagaagtcatcgaaggacagcatgccgggcaggaagcgccggcactgctcgggcgtgccatagcggatcagcgtgggtccgatggtatcgatgccgagattgtcatagcgcggcgcgtcgctggccgccagctcttcccggaagattgcctgctccaccagcgaccatcccgggccgccgtactcccgcggccagccaggtgccgcccacccgcgcgcatgcaggatccgctgccagcgcacggcctgctcgcgcgtcaccaggcaatgggcgcgcgaagcggcccggatatcgggcgggaccacctcgcgcaggaagctgcgaacctcctggcggaatgcttcgaggcgatcggctcgggaatgatctggcatggttggccctttgatgaaagcactgctgggttgcgttctcctgacgggatcacagtcaccctggcgaccatgccggcttgcgcttctccacgaacgccgccacgccttcctttgcgtcatcggttaccgcgatattcccgaagctctccaccgcaccggctacgccgcggcggtagtcggagtcgttggcgcgcaggaaggcggcgcggcccattcgcacgatggtgggcgatttctcgcagaaggattgcgccagcgcccgggcttcgcgcatgacgtccggctgcggcacgacgcggctgaccaggccaagccgccaggcttcgtcggcatcgaatgcgcgcccggtgaacagcaggtcaaaggcgcggtggcgcccgacgatgcgcggcagatgcgtgtagtggatggcagggatcatgccgacgtcgatctcgggatagccaaatgttgcgtcctcggccgcgacgatcatgtcgcacgagatggccagggtcatgccaccgccgcgcgccgcaccctcgaccgccgcgatcgacggcttcttcagctggaactgcgcctcgcacaaccccacatagagtttctccaccagcgcatagagctggctcggtgaagactgctgcacggcatcgagccgcaggccggcacagaagcggcgcgggatggcgctgccgaggatgacggcgcgcaccgagtcgtcttcggcggcgcgccgcaaggcgccgatcaggtcgtcgatcatggcctcgttcagcgcattgactggcaggctgtccagctggatttcggcgacctggtcgcgcacggcatagcgaatggaggacatggattccattgagtggatatgggacgggcttcagttgacttgggggcgggcttgcctcgcgctcactacgtgacggatccggcgaccgccacgatgccgtcggcctggtagcgccggatcatgtcggggccaaagcctgcctcgcgcagaatttcctcggtgtgctgccccagcaggggcggcgcgcggtgcgcctgccgcttgccgtcgcgaaaccgcaccggcaaacccatgttccggaccgtgcccagcaccgggtgttccgattcgaccaccagctgccgcgcctccagctgcgggtgggcaagggcctggtcgagtgtgtggatgggcgagcaggccacgcctgccgcgcgcaatgcctgcagccagaatgcgaccggctgcgtggcgatgcggcgctgcacgaggtccacggtgcgcgcgaagttggccacgcgcgccgcattggtggcgaacgcggggtcgtcgacgtggtcgtgcagcccggcgaccgtgcagaagcggcgccactgggcatcgttgccgacgccgatcatgagcgggccatccgctgcatcgaaggcctggtacggggccatggcggggtgcgcggtccccatgcgcgccggcgcccggccggtgcgccagtagttctgcgccatgtagcccatgaagccgagcgcggtatcgagcagcgagacctccaggtagacgccgtgcccggtcttttcgcgttcgatcaacgcggccaggatgccgctgaaggcatgcatgcccgtgcccaggtcgaccggagagaaactggcgcgcgccagcttgcctgccggatcgcccatggtgctaatcatgccgctgaacgcctgcagcatgacgtcatagccgggctcgttgccgagcgggccggtgcggccatagccggagatctcgcagtagatcaggcggggattgcgcgcgctcaggctgtcatggtccacgcccagccgggccgcggtgcctccgccgaagccctgcagcacgatgtccgcgccggcggccagggtctgcacgagctgctgtccctcggcggtcttgaggtcgaccgcgatgctgcgcttgttgtggttgaccgaaaggaaggttgccgactggccctgctcctgcggcagccaggcgcgggtatcgtcccccacgccgatcggctcgaccttgacgacgtcggcgccgagttcccccagatactggccgcacagcgggccggccagcaccttgctcaggtccagcacgcgaattccttgtagcgcaagcatgggcagtttcaatggatgtaaagtcggatgagagggccgggtggcggctattccgcccgaatgccaatgctgcgggccgcggcagtccagcgttcagcatcgcggtcgacaaaggcctgcacttgcgccggggcgatcaggagcggctctgcgccacgcgcggccagggcgcgctgataggcgggatcggccagcgccctggccagggcctggcgcagcgcggacacgatctcaggcggggtcctggccgaagcctggagcgacagccagtacttcatggccaggccgccgtagcccgcctccttcatggtggggacggccggcaacagcggcgaccgctctgccgaggtgatcgccagccccttcagcttgccgccctgaatctggctcacgcaggtggtcatgctgtcgaacaggaagtccacctggcccgccatcacatcgctgctggccggcgcgctgcccttgtacggcacttcaatggccgagaagccggccagccgctggagcagcgcaccgtagatatgcggagaactccccggcccgtaggtggcaaaggtgaggttgccgggccgctgcttgccaagcctgaccaggtcgcccatggtcgagacaccgagcttgcccggatggaccaccagcacgttcggcacggtggcggcaatgccgatggccacgaaatcgcgctgcggcaggaagcgcgcggctgggtacatcaggggattgaccgcctgcatgccgaccgtgttcagcagcagggtatggccatcggcctccgtgtccagcacgaactgcgctcccaggttgccgctggcgcctggcttgttctcgaccacgaccggctgcgccagcacctgcgcgagatgcttcgcggccaggcgcgcgacgaaatcgcccggacctcccgccgcgaacggcaccacgatcctgaccggcctggaaggccagccctgtgcaaacccgtgccgggccagcaaggcggcggcagtgccgagcagcagggtgcggcggctgaatgtcatggcagtctccggtgtggttcccttgtccctggccggacacgcttgcctggcaggatgggaatctggttgccactatggcgccggccttgctataagtaaaagaccgtttcacgatgccatacatataatttttatatactgagctccccgccttgtcgcgcgtttgctggaaatcccatcatggccattgatatacgggatctgcggtgcttcctggccgtcgtgtccgcaggctcgatctcgcgggcggccgagcacatgcatctggcccagccggcgctgagcctccagatcaagcaactcgagcaagaactacgcgtcaggctgttcgaccgtacccagaggggcgtgctacccacggcggcgggcctgcgcttcgtgagccacgccaaggacatcctgacccgcgtcgacctggcctgcgaggatgtccgcgacttcgtggccgagccggcgggccgtgtcgcgatcggcctgccccagtccatggcgcagatcctgaccctggcgctggtgcgcgagacgctggcgcgctggcagaagatccagctccagatcatcgaactgagcacgggctatatcccggagcgcctgctcagcgggcacatcgacatcggcctgaccttccaggtggatcctggcgccgggctgctgttcgagcatctgctggacgaggacctggtcctggtgggaccccctggcgcgctccatggggcgccgaatgccagcggcagtccgggcacggtcggccaggtcgccttcgccgaactggctgactacgccatgctcctgccggccgggctgcatggcctgcgcgcgctgatcgaccgccatgcgaaatcccatcacgtcagcttgcgcgtgctggcggaggtcaacgccattccgcagttgatcgagctggccgcggcgggggtcggcttcaccatcctgtcctatgcgtcggtccgccgcgaattgcgcagcggcttgctgtccgcggcccgcatcgtcgagcccggcatttcgcggccggtctacctgtgccgctctgccaccaccccactgtcgatggccgcatcgaccgtgcaagcgctgatttccgacacggtgcaggccctggtcgccgacggccgctggccggcacacgcttcctgaggccaggctggcctactgcgcaagctacgcccgggtaaactgtcgggaacaccacaatcgaagctgcgatgcggatttttgcatcgcacctttcccccgccatgcgcctcatcctgatcaccttcggtacccagggcgactgccgccccatcgtcgcgctgggcctcggcctgcgcgccgccggccatgacgtgctgatgctgggcgaacgctcggcggccacgctcgcggcagagcacggcctcgccttcgcgccgatggcaggcgatatccagcagacgctggcgcccggcggcgcgctgcacaagctgatgaccgaaggcggcaacgtcgccgaggccacgcgtgcattcgcgcgcattgccgaggacaacaccgaggcgtggatggcgcagctggcggaggctgcgcgcgatgcggacggcatcgtgttctcggggctgacggcgtatgtggcgctgtcggtgggcgagcagttgggcaagccggtgatcggcgcgggcatgttcccgatctcgccgacgcgggcctttccgtccgcgctgctgccgccgttcaggatgccggggtgggccaatcgcgccagccaccacgtgatcaacttcgtgctgtggcgcatgttccgtagcgcgaccaatgctgcgcgctccaggctgttcggcgcgtcggcgcgcaaggcgatgtgggcggactttcctacgctgtacgcgatctcgccgcagctggtcccgcgtccgcatgactggcatgacgactggctggtgagcggcgcgtggaccatgccgccgcagccggactggcaaccggacgcgccgctgcgcgacttcctggcggccggcgaggcgccgctgtatatcggctttggcagcatggcgggctttgaccggcacaaggtggtgacggcgctggtgcaggcggccgatggccggcgcgcgctgttctatccgggctggagcggcatcgacgtggcggcgttgccatccagcttccacgtggtgggcgccaccccgcatgactggctgttgccgcgcgtgtcggcggcaatccatcacggcggtgcgggcaccacgcatgcggccgcggcggcgggcgtgccggcgatcgtgctgccgtttgcgggcgaccagttcttctgggcgggccggctggcggcactgggcgtggcgccgcgtcatgtcgccgggcacaagatcgacgcgccgcggctggcgtcgatgatcgcctttgccgagcagccggccacgcgcgaacgggccgccaggctgggccgcgcgatggccgccgagcgtggcgtcgaccacgccgtggcggcgattgagcgcttttgcggcaggcagggcgcataatcccgttccgcattccgcattcactgacgcaggaccttccgatgttgaaccgtacccagcaaatccttgttgccatcgtcgccgtggctgtccttggcatgttgtggtttgccggcaatgaccgccgcgacgatgtcggcgatgccgcgcccgaggcgcaggccgaagccagcgcggtgccggccagcgtcgtgcgcgggatcccgcgcgatggcacgctcgacccgatcagcattgacccggagcgccccgcggaccggctgccgcagctccaggccgacacgctgctgaatgactaccgcgacaaccccaaggaagccgacacccgctacctgggccagtacctgatcgtcgaaggcgtcgccagcggcattcgccgcgagcgcgaccaggtctttgtcgatatccgcaccaacgatcccggcgtgaatgtgcgcgcactgctgctgcaacgccagatctgcggcccggcagggcgggtgtgcgaggtggaagcacgagccaccatggtgcggcgcggccagaaggtcgcgctcgaatgcaacggcgcagggctggcggatggcgcaccgctgctgcgcgactgcctgctgcgcggcggcgccaactgatcgcgccatcctagattccggagtcccgccatgcaatccgttctgtccgtccttgccatcctgatcatggtggccaccatcgtcggcgtggtttcgcccgcctggctcagccagacgctgtttggcggcagacccgtcacgcggctgcaggtcgcagtgatcggggtctgccttgccgggctgtgcctggtcctggtgggccggctggctcaaggcggcggcgcgggcggctgaggcgccaccgcggcgcagaagcggccgttttgcgcttctgtttggacgattggatcggcgtgccggcgcctacagtgtgaaggtatgcggtggccactgtgtcttgcatggcagcccgccccagccatacaggacatccatgtacaaagctatgctggccgcaggccttggcctgctgatcaccggttgctcgacctaccaggcagtgaccccggtcgaccggcccgaccacaccgatcccctggtcgcgttccaggtgcccgctggcggcggcccgctgggcaactacggcgccaacggcacgctgctgtgcgtggtggtgaacccggtcacaggcaatgactttgtcgagaactttctctcatcgctgcggcggcgcaattttgaggtgaaggtgctgcaggcgcagacctcgatcgcggcatgcccggtggtggcgctgtacacggcgcgcagcgcctggtactggactgcgtacctgaacagcgcggacatcaccgtgttccgcaacggcgaccgtgtcggcaaggccatctataacgccaaccgcagcgcgggcgggctcaacctgagcaacttcgtgcagccgtcgtccaagctggatgaactggtcgaacagctgttccccggcatgctgccgccgcccccgccgccggcgggcacggccgccccggcggcctagcctgtcagcagtcaaccggagggccggaccatgcctctctgcgcagcatcttgccgggcgcagccgcgcccggcccagcgtacccggatcagcgctccagccgccccaggcgcaccacggtcacgcccgggcgcagctgccgcagcgacggcatcaccagcacgcaatccggatacggcgtcaccactggctcgccgtcgcgccagccgattacggtcccggcctcggtaaaggtctccagcccggtataggggccggcaaagcggaagtccatgctggtggccaccaccggctcggtcacgcgcaccacgcgctgcgtggcgggcagcggttgcagccagcctgcgggcaagtcgctcgcatcgatcacgccggcatgcagcaggaagcgcgcggtgctgtcctgcgccacggtcacggcggcgggctcccagtgctggccgcactcgatcagcagtgcattgcgcgggctggcggcatcgccaaagccatcgtagtcgcgcatgcggcggccttcggggtggccttcgtcgacgatcacatcggccggcgcgcccagcgcgcgcgccagggcgatgcccttgtcgagcgggccggagacgatcagcggccggcttttctcatgcatcgaatgcaggtccagcagcaggtcgacggtgtcgatcaccggccgcatggcgcgcgcgcggcgcagctccgatgaatccaggctggcgtcatccagcaccctggcggtccacacgcggttgaaatcctggtcgacaaagcgcgatgcgtcgggcctggcggcatcgaagctgtggtacgcgtcgacgttggcaaacgccagcgtcagccggccgcggcgcgggcgcagtccgtggtccagcagcgccttgacgccgatggcgccgcagacctcgttgccgtgggtcagcgcgttgaccatcacgtgcgggccgggctggccgctgtcgaaggtgtacaggtaggggatgccggtattgccggcggcgtaggcgcggatgtcggggaacgcgacatcgactgggtaggcgtcgatcggtgcggtgggctgggtcatgggaatcggtgcgttcagggcgcctggcaggtcgtatgcctgcggggtcgttgttgtgaatcgagttgaggaagggcggcgggcacttgcaagaagcgacgccgccccgcaacctcacttattcatgaatgccagcggtctgcacgatggtgcgatagcgccccgtctcgcgcttgataaagctgccgaactgcgccggattggcaggcgccacttccacaccggcttctgccagcttcttcttcacatccggcatggccagcacggcctgcatctcggtgttcaggcgctccaccaccgcttgcggcagcctggccgggcccatcaggccgaaccacacgcccatgtcgacgcccttgagcgcgggcgtctcggccagcgcgggcacgttcggcgccaccggcgagcgcttggcgttggtcacgccgtaggcctgcacgcggccggcctggatatgcggcagcgccgacgacagcaccattaccgccaggtcgatctggccgccgagcaggtcggtggccatggccgacgcgcccttgtacggcacgtgcgtgatattgaccttgccctgctgcttgatcagctcgccggccaggttcagcggcgtgcccacgcccgacgaggcatacgacagcttgcccggctgggccttggccagcgcaatcagctcggccgcgttcctggccgccaggccgggcttgccgaccagcaccatcggctgggtgccgacgaaggtcaccggcaccaggtccttttcgccgtcgtagcgcacggcggggttggtcaggcgggcgatcgacacttcactgcccgagcccatcagcagggtgtagccgtcggcctcggccttgaccaccttggccgcgccgatggtgccgccggcgccgcccaggttctcgatcaccacgctctggcccaggcgcttgcccagctccggggcaatggtccgggccaccaggtcgacgctgccgccggcggtgtagcccaccaccagcgtgatcggcttggcgggccaggcggaggcaacggcgccggcggaagcggcaaggcagagtgcggcagcggccgcgcgcaggatggtcttcatggtcttggctctgggggtcccggaatggttgttgtggagcgatggtagtgagcgcggaaccggcccggcgtgcagctttggcaagggcggttgccgattcggcaatggtggccgaaggcgcatcagcgcggtgcctgcaccgccgcctgccagaaagcctcggccagcgggcgcatcggcgcgcgcgggcggtacaggcggatatcgagcgccaggtcgccgccatcatcgctgcgcgcgccgctgatggcacgcaccaggcgcccggcgtgcaggtcgtcggcaatcaggcgtgccggcagccaggccaggcccatgcgctggcgcaccatctcgtgcaccgactcggcaaagtcgctgaccgcgatcacgtccagccgcggcgccagcttgcggcgcgcgatctcctggttgaccatgcggccgagtgtcagggtctcggcgtaggcgatcatgggcaccggcttcgccgcagccttgccggtcgcaagccggtgcagcggcgcgccgcgcgcatcggcggcgctgacgcaaaccagccgctccacgccggccaggtggaactggtagcgcgcgtcatccagcatcaccggcaggtccggcgggctgtagcagagcaggaaatcggcatcgccctcggcaaacatggctagcgcgtcatgcatcgggaaggtcgacagctgcgtgcggaaaccggccgccgcggggtcgtgccgcagcgcctcgcgcaggcccgccagccacgccggcaccatcgagcgcgccagggtcttgccggtggcgatggtgaccgtgctggcgtcggcgcggtgcgcggcgcgcagcgccacgcgggtctcgtccagcgtgcgcaaggcgctctgcgcggcttccaggaactggcgcccttcggcggtcagccgcaccgggaacgcgctgcggtcgatcagcggggcgccggcccagacctcaagcgcctgcatgcgccggccaaacgcgggcggggtcacgttgcgcagctcggcggcgcgcgccaggctgccggcctgggccaggcagacgaagtcttcaagccagcggatatgcatggaaggcggaccgttgaaggtggggcggcaatgccctcattatcggcaataccggccgccacctttgcctgccgcattcctcggttagaatttttcgcatgacactgatccggcgccgccacccctcgtccccgaccagccaggcgtccgacaccacgccgcccgccccggaatacaccatcgacgagctggcgcgcgtggccggcaccacggtgcgcaacgtgcgctcctaccaggaccgcggcttgatcgatccgccgcagcggcgcgggcgcgtcggcatctacacgcaggcgcacctgggacggctcaagctgatccaccacctgctggcgcgcggctatacgctggccaatatcaccgagctgctcaaggccatcgtcgaggggcacgacctgcgctcgatccttgggttggagactgccatcagcagcccgtggaccaacgagacgccgcggcactactcctacctggcgctggcgcggctgttcggccgcgcgatctcgcgcccggccctggccaaggcgatctcgctggggctgctggaaccggacggcctgggctatctcgcgcgcagcccgcgcgcgctggccgcgggcgcggagatcgcccaggcgggctttgcgctggaagacgtgctggagatcatcgcgcagtcgcgcgggcatttccaggcggtatctgaccatatcgtcgctaccgtggtgcgcgagctggaccgctttggcattggcaagctgccgccaccgcaggacgtgccgcggctggtggagatcctgtggcgcatccgcccgctggcactggtgatggcggagacggagatgatgcgggcgctggagatctcggccaacaaatacctgggggaccgggtggcggcgatcatcgagcatctgcatgacgaggaagatggcagcggcgggaagccatgattccgctccggtccggtcccctcccccgctgtacagagcgggcacacaggtgacaggtgtgcgaggacatgattgacgcttcccggcacacgcatcccaccgcgctacctcgccgcccttccccgcaccgactcctccagcaacgaccgcaacttcgccagcgcgcccggatccccgtgcgcggctgagcgcgcataccagatcttggcctgctcgagatcccggtcgaccacgccgggctcgccgtgttcgtagaagctgccgacgatgtattgcgcgccgccgtcgccggcactggccgcgcggctgtaccacatgaacgcctgtccgtagtcgcgcggcacgccccggccagtgaagtaattcgtcgccagcgccatctgcgcctgcacatgcccgccctgtgccgccagtgcataccagcggttggcttcctccagtgacttcggcaccagttcgccgcgctcgtaaaggtcgccccaggtgtactgggcatgcgtcatctggttgtcggccgcttttttcagccagaccagcgcctcctgcgggcgggcggcggtgccctcgccgcgcagcagcatcattgcgtagttgaactgggccagacggttgcccagccgggccgcatcggcaaagccgcgcagggcctggtcgaagttgcccgcttcatacgcggtgaccgcgtcgcgggtctggacctgcgcgggggcaggcggctgcggtgcggaggctgccgcctgcatgcacaacagccatgcggcggtggcgccggcgagcaaggcggcaatcggggggcgggcaatcgacatggcggactccgggcacagcgccttcctgaatccagtgtagaagtcaggacacggcgccggtaggcaggcgcgaactcgccggaatatccatgcgaataattaatcggccacaatatctgccacgatcattcctcgcacagataaaaccaggtcttcagatccacccggcccgatgcagccgccgccacagtcccccgcaggcgaccgcggtcacgccgatcactgccgggtaggcgaagtggaatttcagttcaggcatgaaatcgaagttcatgccatacaggctgaagatcacggtcgggatcgccaggatcgcgccccagccggccagccgcttgaccacctcgttctggcccacggtgaccagcgccaggttgacctgcacggccgtggtcagcatttcgcgcaccacgtcgagcgtgcgcaccagccggctggcgtggtcctcgatgtcgcggaaataggcgcgcagctccttcggcaccaggtcttcgtgcagccggatcagctggccgcacatgtcctccaccgggctgaccgcattgcgcagacgcagcacctggcgcttgatccggtacaggcgctcgatcgccgcacggtcgaactcgtcgcggaagatgccctgctccagcgcctcgaaggtgtcttccaggcgcgtgacgatgggcaggtagtggtcgacgacaaagtccatcagcgcgtacagcacatagcccgggccattggccaggccgtgcgggtcctgctcgcagcgctcgcgcacgggcgcgtaggtgctgctgacaccgtggcgcaccgaaaccacatagttggggccgacaaagagatgggtctcgccgaccaccacttcatcttccaccagttgcgccgtgttgagcaccacgaagaccgaatcgccgtaggcctcgagcttggggcgctggtgcgcatcgagcgcatcttccaccgccaggtcgtgcaggccgaacgcctgctgggcctggcgcagcagcgcgaggtcaggctcatgcaggcccagccagacaaaggtgccgggcacccccagcacggtgcggatctcatccatgcccactgtgccgagccgcttgccctgccggtaggccacgcaattgacgatggcgcccatgaaaactccgctgatcagatggcgcaatcgtaacaagcctttacgctgtgccggactcgatgcgcgttgccccgcgcggcataccacgctggccgcacttgtccggcgctacggtgtgccgtgcacgcgcatatggaacccacgcgccacctgctgtacatatcgatccaattgttacagttcgcgacagatacgacgttagaatgtggcatttccacggtcacccggctatgtcccagaagaaatcgccacgcttcgagctgcgcagtggcaacgtagacgccctccttctcgccctccagaccgccgacatggctgcgctgcgggatgacctcctcgcccgctttgaagccacccccgacttcttttccaatgacgtgattgcgctggacctgcgcgcgctggaagatgacagcgaagtcgcgcttggcaccgtgatcgagacgctggccacgctcagggcccgcgccatcggcgtggtggcccgccccggccagcgcgagtgggccgagcgcttcggcctgccgctgctggacagccaggcccgccgcggcagtggcgccgatcgcgccaccgaccgtgccgccgaggccagggccgcagccgcggcggaacaggccgcagccgaccaggccgcgcgcgaggaatccatccgcgccgccgcgcaggccaccaccgacgccgccgtggccgctgccatccgccagacccagaccatgctgatcgacaagccgcttcgctcgggccagcaggtctacgcgcagggcgacgtggtcatcctggacgtggtcagctacggcgccgaggtgatcgccgaaggcaacatccatatctatgccccgctgcgcggccgtgcgctggcgggcgtcaagggcaacaccggcgcgcgcattttcagcacgtgcatggagcctgaactgatttccatcgccggcatctaccggaccgcggagcagacgcttccggccgacgtgctcggcaagaccgcccaggtgcgcctggccgatgaaaaactgatcctggaagcgctgcggctcaagtaaccgcggcagcccccgggaccgaattgcagagagcgcaagcttcaacttattactggaccaaagagccatggcaaaaatcatcgttgtgacctccggcaagggaggcgtcggcaagaccaccaccagcgccagctttgccgccggcctggccctgcgcggccacaagactgccgtgatcgacttcgacgtcggcctgcgcaaccttgacctgatcatgggttgcgagcgccgcgtggtgtacgacctgatcaacgtggtgcagggcgaagccaacctgcgccaggcgctgatcaaggacaagaagtgcgagaacctgttcatcctgccggcctcgcagacgcgcgacaaggacgcgctcacgcgcgaaggcgtcgagaaggtcatcaacggcctgatcgagatggatttcgaattcatcatctgcgactcgccggccggcatcgagtcgggcgcgctgatggcgatgtacttcgccgacgaggcgctgatcgtgaccaacccggaagtgtcgtcggtgcgcgattcggaccgcatcctgggcatcctggcctccaagaccaagcgcgccagcgaaggcggcgacccgatcaaggaacacctgctgatcacccgctacaaccccaagcgtgtgcatggcggcgaaatgctgtcgctgaccgacatccaggaaatcctgcgcatcaagctgatcggcgtggtgccggagtctgaagccgtgctgcacgcctcgaaccagggcacgcccgccatccacctggaaggcagcgacgtggccgacgcctatggcgacgtggtggaccgcttcctcggcaaggacaagccgatgcgtttcaccgactaccagaagccgggtctgctctcccgcatcttcggcaacaagtaacggtcaaggagggctcaccccatgtcgatcctttccttcctgctgggagagaagaagaagtccgcgtcggtcgccaaggagcggctgcagatcatcctggcgcacgagcgcaccggccattccgcgcccgccgactacctgcccgcgctgcagcgcgagctggtggcggtgatttccaagtacgtcaagatcggcgaccaggacctgcgcgtcagcctggagcgccaggacaacctcgaggtgctcgaggtcaagatcgagatcccgcagaactgaggacggatcccggcgctgccggattcgttcctcctccttcggttttcccgcacttcccgtctttccgccgaccgcggcgccgcttgcgcgccggggtcggccggcccccgtcctccccgccgcgattccccaccagcccagtgtgcaggccagctgccagcgctgccagaacgccccaattcggaattctgtagcggcgagacaacggatttgcaccaaaatcctgcttgaaagggcagcttggcggagttttgtgtccttgtagcttacgttttgttaaattttcgcggcgtctacaacgaaacgtagacatcgtccccgccgtgatccggcggagagaacagtacaagacagaaaaggagcaccatgaagaaatcggccatcgtcctcgcagccggcagcctgttggcaggttcggcgttcgcacaatcgtccgttaccctgtacggtatcgttgaccagagcatccgcttccagacgaactccaacgccaacaacgacaacctgtgggaactgaccaacggcgccgtcaccaacagccgctggggcctgaagggcagcgaagccctcggcaataacctgaaggcaatcttccagctggaaggcggcttcgatccggacaccggccgttccaaccaggccagcgccaccaacccgaacggccgcctgttcggtcgtcaggcttacgttggcctgtcgggcgacttcggcacgatcaagctgggccgccagtacaccgaaggctttaacttcttcggcgactacgatccgctgaccatcggcaactacaccaacaacgcctggccgttcttcctgacccagttccgcagcgacaacgtggtcagctacggcggcaagttcggcggcctggacgtgggcgccagctacggcttcggcgagcagccgggcagcatgaccaagaaccagtactggggcacccgtgccgcttactcgttcggtccgttcggcatcggcggcgtgtaccaggaaatccgcgacatcaacggcaacaagcagcaaatgtggggcgctgccggtaagtacgcctttggtccggccaagctgttcgtgggctacgtcggcggcaaggaccgcaccggcgtgatcgacaacggcttcctgaacaactcggctgccgcgcctgctccggccgtggtcaccgccggcgctgccagcaacccgcgcaaggacaccctcggctacatcggcctgacctaccaggccaccccggccctggcgctgaccggcgtgttctacggcgactacgtcgagaacaagaacggcgtgaacgacaacaacggccgccgctacaccggcgtgctgctggccgagtactcgctgtccaagcgcacccaggtctacggcacggttgacttcaacaaggtttcgggcggcaccaccaccgaaatgccgggccgcaacaaccagactggcgctgcactgggtatccgccacatcttctgatcgacacccgatcagcagttcctggcaaaaggcaccttcgggtgccttttttcatgggcgcggccggcgccgcagccacaggtaccagccggcctgcgaggtggcttcgcccatcggctgcagcggcaccagcacgccgccatgccgcgccaccacgcgctgtgcgcacagcagcgccggcccgggctgcgccagccgcgcggcgctttcgtcgtcggcggaatcgaacgccagccacagcgccaggccgccggcatggccacggcacgtgatccgcagcgcagtctcccgcgccgcggcatcaatggcgctggtcagcagccattccagcgtttgcgccagcatggcctggtccccgccaaggcgcggcaggcggccggccggccgttcaagccgtacgccggcctcgctggccagggtccagacgcggtccagcgcttcatccagcagcgattccatggcgatacggcgcatgcgataggcgtggcgcgtttcgcgcagcagccggttcaggtcgtcgatctggcgcagcgaacggcgcgcatggctgccgacctgcgccagcagcgcggcgtcggcctgggcccgcgtgcggcgcagttccagccaggccagcagcgaggcattgggtgcgcgcaggtcgtggccaagcacgtgcagcagcatgtcgtgcacggcggcggggttgcgcacatcagcgcgccgctgcgcgaccggccggccgccgaaccacggtgccacggccagccccgcctggtgcagccgggacgctctcatgcggcggcccgttcggtgcgctccgggcgatcggtacgctccagccggtagccatgcgtgtagaccggcgtcagccgcaagccgtgccctgcctgcagcccaagcttgctgcgcacgcgcgagacatgggtatcgatggtgcgcgacagcggcgagatctcgcggccccagaccgcggcggtgatgtggtcgcgcgtgacgatgcgcccctcgttgcggaacagcagcaccgccaggtcgaactctttgggcgtcaggctgaccggatcgccgttgcaggtgaccttgcgcagggcgcagtcaaaagcgtactcgcccagccgcaacggcgcgagcggcgccagctgcgcgggatacgcgcgccgcagcaggcagtcgatgcgcgcggccagctcggccgggcgcaccggcttgaccatgtagtcgtcagcgccggccgccagggcgttgacgatgtcgagctcggcctcgcggcaggtcaggaacatcaccgggatgcggcggtcgaggtgggtacgcacccaggccagtacctcgcgcccggacaggtccggcatctgccagtccagcagcagcaggtcgaagcccgcgtcgcgcagtgccagcagcaggcgccggctttcggcgaaagtcacgcagtcatgtcccgcgccggtaatgacctgccggatcagcgccgcatccgcgggcgcgtcttcaagcgatgcaatgcgcgatgccattttctttcccatgtgttgtctccgacggaacagaacactagcgggacatttaagaccgcgttgccttcggcacgaataggaaagacctcaatctcgattttcaacaatcttttacttctcgcctcagcaggccgctcctaccatgggcttcgctgcgtgccgagcgggcccgcagtgccaagctctgtccatccatcggcgcattccgatgcgcccgcgcaggagccactctcgtgaacatcgccgcgctgcaggcggacccgaccctcgccgtcagcatcgaacagaccctgcgcctgaacgggcaccagtgcacgcgctatctcagcggacgcactatgatcggcgcgctgcgcggccgttcgttcgatctgctgatgctcgactgcgatacgccggggatcccggccctggaagtgctggcatgggtgcgccgcacgctcggcaacgagatgccggtgatgctgaccggcacctccaacgaagaagccttcgtcgcggcctgctttgcgcaaggcgccgacagctatgtgcccaagccgctgcgcacggccgagctggccgcgcgcgtgctggcgctgttgcgccgcgccaggccggcggtcgatgaatgcgacctggagcacggcgtgttccgctttgccaccgcggagcggcgcgtgtgggtccagggtaagccggtgctgctggcccccaaggaattcgacctggcggtgctgctgttccgcaacctgggctcgctggtgctgcgccaggccatggtcgaccaggtctggcgctaccacatggacccggcctcgcgcacggtggacagccacctgtcgcgcgtgcgcaccaagctggcgctgtggccgcacaacggcgtgcggctgtcgtcggtgtacgggctgggcagccgcctcgatgcggcctagcctcaatcggccttgatgcccgcgtccctgacgatgcgggcgttctccgcggactcttcgcgaatagccttggcaaactgcgccggcgtaccgccggtcggcacttcgccgcccttgagcaggcgctcatggacttccggctcggccagcgccttgttcagttcggcgttcaggcggttgatgatggccgcgggcgtcttgcccggcgcgaagatgccgaaggtcgaggtcaggttggccttggggtagcccagctcggccagcgtcggcaccgagggcaggctctccaggcgcctgggcgcacccaccgccagcgcgcgcaggcggccggcctgcatatgctgggtcagcaccgggctggcgttggtgctcatcacctcgaactggccgccgagcgcgtcattcatctgttggcccgcgcccttatacgggatcagcgtgatgtcggccttcgacttctgcttgatctgttccagcactacgtggccaaccgttcccaggcccgacgttgcccagcgcaccgagcccggtttggcgctggcctggccgaccacgtcggcaaagcccttgccgctgaagccggcggtggccaccaccagcaccggcgagtacatcacgctcatcaccggcgccacgtccttctgcgggtcgtagttgacgcggccgacatgcgggttgagcgtcagcgggctggtggcggcgaagcccagcgtatagccgtccggcgcagccttggcgaccgcatcgatgccgatgctgccgcccgcgccggccttgttctcgaccaccaccgaggtgcccatctgcgccgacagccgctcgccgagcgcgcgcgccacggtgtcgctgatgccgccggtcgggtaggcgacgatcaggcggatcggacggctgggataggcgtcggcagcggcggcaggcagtgcggcagcaccgctggtcacgcacagggcggccagcagggatgagcggaaggggaaggccatgatggaaatgcgggagagatttcgacaggagggcgccgggcgggcgccgggcgcggcagcggttcgccggtctggcgcggagcagccgctatcttagccgatcggggcgtgcgcgctcagcgcaccagcgggcgttccggcacccacgagacaaagagttcgttggcccggtcatacaggcgccataccgtgccgcagtcgcggcaggcaaaggaaagcatgctgaacggcacgccggcggcgctctggctcaccagcggcaccgtgccgcgcagcgccaggcaggacggcggctcgcgccggcgcgggtcggcggcgagcgccaggcagcgctcgcaggcaggcgtggcagacggtgccgacgcggggtggatggatggcggggacggaggcacggcagacttcatgcccgccatgatgccgcaaaacgccgcccggcagcagccgctcacgcaatctcggatcaggccagctgcgtgcgcgtcaccgcggccggcgccgccgcgcgctggcccagccacacgctgcccagcaccagcagcgcgccggcagcctgcatcgccgtcaatgcctggcccagcaccagaaagccgagcacggtggcgctgaccgggctgagcagccccagcgccgccaccgcggacgacggcatgcgcccgacaccgcggaaccacagcgcatagctgaagccggccccgacaatgctcagccacgcatagccaagccagttggccagcgtgaaatgcccgggcagcggttccagcaccagtgcgaacggcagcaggaacagcccgcccgcgcacaactgccatgccgtcagcaccagcggcgagaccggcgggcgccagtgccgcgtcagtaccgtgcccaccgccatcgataccgccccggccgctgccgccgccacgccgatggcatcgagccgggcggccgggcccagtaccagcagcgccacgcccagcagcccgcccacgcccgccagccaggcggccggccgcgggcgtgcgcccagccaggcccacgccagcaccaccacgatcagcggctggatcgcgccgaccgtggccgccaccccgcccggcaaccggtacgcggcgataaacagcatggcctggaagaagccgatattgagcacgcccagcaccgccgcgcgccaccaccagctgccgcgcggcagttgccggccgaaggcaagcatcgccagcccggccggcagcgcccggatcacgcctgagagcagcggctgccccggcggcagccactggctggtgaccaggtaggtgctgccccagatggccggggccagcccggtcagcaggatgtccctgagggtcacgccgccggtcgcggccagggaggaagatccactcgccttcatgtcgatattcttgatgtcaagataaatagactttacgaagccgattggttgatgtcaagatacttcggtattccgcccatcgcgtattcccacgcccgccctgctgatgactgcccgccgcaaacccgaagacacgcctgaccacgtcgatggcattctcgcccaatgggcgcgagagcgcccggacctggatgcctcgccgatgggcgtgatcggccggctgggccggctcaaccgccataccagccgggccattgaagccgcgcttggggaaaccggcctgcagccgtgggaattcgatgtgctggcgacgctgcggcgcgcggggccgccgtatgcgctgtcgccgggcgcgctgatcggctcgctgatgatcacttcgggcaccatgaccaaccggctcgaccacctggaacgggccgggctggtgcggcgccagcccaatccggaagaccgccgcgggttgctggtggaactgaccgaaaccggacgcgagcgcgtcgaccgcgcgctggaattgcacgtggccaacgagcaccgcctgctggcggacctgaccgcgacggaacgcgcgcagctggctgcgctgctgcgccgctggctgcgcatgttcgagccgccaccgggcggtggcggcgaaggcaatgaaccggcctgagtgtcaggcccgctgacgctcgcgcaggtcgggcaggaagatcgtcagcaggcccagcagcggcaggtaggcacagtactcgtacaccgcgcggatgccatgcgtatcggccatgccgcccagcaccgcggcgccgatgccgcccatgccgaaggcaaagccgaagaacaggcccgacaccatgccgaccttgccgggaatcagctcctgcgcgaacaccaggatcgccgagaacgccgaggccaggataaagccgatgatgaaggtcagcaccgtggtccagaacaggcccacgtgcggcagcgccagcgtgaacggcgccacgcccaggatcgacgcccagatcacgcgcttgcggccgatgcggtcgccgatcgggccgcccaggatggtgcccgccgccaccgcggccaggaacatgaacaggtgcagctgcgcgtcctggcgcgccagcccgaagcgctccatcaggtagaaggtgtagtaggaggtcaggctggccatgtagaagtacttggagaacaccagcaccatcagcaccaccatggcccgcaccaccaggcgcatgggaaccgggctggccaccgcgccggcggccttgtgcttgcgcgcgccctgcgccagctggcgcgcataccagccgccgatgcgccacagcaccacgatgcccaccagcgccgccagcgagaaccacgccaggctggcctgctggtgcacgatcagcgcggccagcagcggccccatggcgctgccgccgttgccgcccacctggaagatcgactgcgccagcccgtgctggccgcccgaggccatgcgcgccacgcgcgatgattccggatggaagatcgatgagccggtaccgaccagcgccgcggccaccagcagcacgccgtagctcggcgccaccgacagcagcagcaagcccgccagcgtgaacgccatggcgatggccagcgaatgcggcttgggatgcttgtcggtgtacaggcccaccaccggctgcagcagcgatgccgtgacctggtaggtcatggtcagcaggccgatctgggtgaagctcaggttgaagccccccttgagcatcggatagatcgccaggatcaacgactggatcatgtcgttgaggaagtgggcgaagctgatcgccgacagcacgcggaaaccggtgcgttcggcctggggggatgtcgcggagggtgtcgcgccagcaggcgcggagtcgatggttgtgctcattggcggctctcgacagacggaaagcggccagcggggggcgccggcctggaaggaactgagcaccgatgctagctggcgcccgggcgcctgtcctgcgagaataggtccccgaccttggagaaaaggacatgccgcgcgcccctcgccccctttctgcttccggagcggcccgccgccgccgcgatcagcatgcgccccctgcccccacgcccgaggcgctggcgctgggcgacacctacgccgatcccccgccctacgtccgcttcgaccgcagccccctgcccgtcaccgccatggccgccgactacctgcccggccacgtgaccaacccgcaccagcatccgcacgcgcagctgatccacgcggtgcacggagtgatggtggtggccaccaccgaaggccagtggatcgtgccgcccacgcgcggcatgtggatgccgggcggcaccacgcactggatccgcatggtcggccgggtgcagatgcgcaccgcctatatccgccccgatgccgcgcccgacctgccgcagcgctgcaccgtgctgggcatctccgcgctgctgcgcgagctgatcctggcggcaatcgacatacccctgccctacgctcccggcacgcgcggcgcgcggctgatgcggctgctgctcgatgaagtgatgctggtgccgtcgctgccgctgcacctgccgcgcccggccgatgacagcctgcggcagatctgcgatgccatcaccggcgcgcccgatacggcgctgacgctggcggactggggttcacggctggggctggaccccaagaccatccagcgccgctttgcgcgcgaaaccgggatgaccttcgggcaatggcgccagcaggcgcgcctgctggcggcgctcgagaagctggccgccggcagcaaggtggtggatgtggcgctggacctgggctatgacagcccgagcgcgtttgcgaccatgttcaggcggcagttcggcgtgccgccaagcgcgttcttccgctgagcgggggcgccatggcggtcagctcgcgaggtatcgctccaccagccgcgtccagtaggccgcgccgacggtcaggttctcgtcgttgaagtcgtagccggcgttgtgcagcagcggctggttggcgccgttgcccagccgcacgaagcagcccgggcgctgctgcaggaagtaggcaaagtcctcgctgccggcgatgcgcgcggcctggtccaccaccttgccggcaccgaccagctcctcggccacctggcgcgcgaactcggtctcgcgctcgctgttgaccagcaccgggtagccgcgcacatagtcgacctcggccaccgcgccgtagccttcggcgtgcgacgtggccagctggcggatgcggttctccaccgatgcgcgcacctcggggttgaacgagcgcacgctgatctccatgcgcgcattgtccgggatcacattgggcgcgtggccggcgtgcagcgtgccgatcgtcaccaccgcggtctcgttcgggtcgacatagcgcgcgaccaccgactgcagcgccatcaccaggctgcctgccaccaggatcgggtcgaccgactggtgcgggcgcgcggcgtggccgcccttgccgcggatggtgatggtgaccgtgtcgcatgccgccatgaaggggcccgagcggaacaggaaggtgccctgctccacgcccggatggttgtgcagcccgaagatcgcatcgcagggaaaacgctcgaacagcccgtcggccagcatgcgctcggcgccgccgcccgcgccgatttcctcggccggctggaagatcaggtgcacggtgccgtcaaagttgcgcgtgcgcgccagctgctttgccgcgccgagcaggatcgcggtatggccgtcgtggccgcaggcgtgcatgcggccggcattgacgctggcgtacggcagtgcggtgcgttcgtggatcggcaaggcgtccatgtcggcgcggatgcccacgctgtgcccgctgtcaccgcagcgcaaggtgcccaccaccccggtgccgcccacgccgcgcgtgaccgtatagccccacgtctccagcaggctggcgaccaggcccgaagtgcggacctcgtcgaaggcgagttcgggatgctggtggatattgcgccggatgacttcaagttcggcgcggctgtccagggtgtcggccagcgcgcagtaccggtgcttgagtggtgacgtgggggacgccgtgagggtggtgccgagataggactcgatttcgggggcgtgctcagacatggtgttttgctctctggcgaaacctgtacaaccagtatttcacgcagaaaacgcgagcgaaacgccaagcgtgcgaattcctgtaaaaccatgtaatcgggcccgtttcagcaccggaactgttgccctaatcgtacgctttgtatggaaaccaaacgctttgtgtaaaagcgtatcgatggggaaccattgcggaccgcgtattagcccgcggcagtgctgccggcatgcgtcaccccgaagggtgacgcgatgccactgccctgccctcagagttcgccgtagggcaccacctgctgcgtctgctcgcccagcccgtccacgcccaggcgcatggtgtcgccggccttcaggaagcgcggcggcttgaaacccatgcccacgcccggcggcgtgccggtcgcgatcaggtcgcccggcagcagcgtcatgaagcggctgacatagctgaccacggtggccacgtcgaagaccatggtggcggtgctgcccttctgcacgcgctcgccgttgacctccagccacaggcccagcgcctgcgggtcctgcacttcgtcgcgcgtcaccagccacgggccggccgggcagaaggtgtcgcagcctttgcccttgtcccaggtgccgccgcgctcgatctggaactcgcgctcggacacgtcattgaccacgcagtagccggccacgtggttcagcgccgcttcgcgcgagacattgcgcgcggtgctgccgatgaccacgcccagctccacttcccagtcggtcttttccgagccgagcggcagcatcaccacgtcgttgggaccattcagcgagctgttggccttcaggaacacgatcggctcggccggcagcggcatgccggcctcggcggcgtggtcggcatagttcaggccgatcgccacgatcttgccgacgccgctccagggcacgccaaagcgtgcgccctcgatcaccgggagcgacgcggggtccacctgcgccagccgcgccagcgccgccggcgccagctgcaacgcgccgatatcggccaccacgccggacaggtcgcgcacgcggccttgcgcatcgatcatgcccgggcgctcggcgccggggttgcctactcgaaccagtttcatcgtcgtcgttatcttcaggggttgttcaggcggacttcttgagggtggcgccgattgcgccggttgcgccggcctcggccagggtctgcgccaccacgctcaggacttccctggcggtgttctcggagtgggcgcgcagcacctgcgccaggcgcggccggccgggctcgcgcagcgcggccatgatggcctcgtgttcctcatgcgactcctgccagcggatggtatcggcattggctgcaccgcgcgcgcggtgcaccttgctcatcagcgtggcatagacgccggccagcaccggattggcggcgccgtcgatgatcagctggtggatttcctggttgatgcggaaatagtcggtgcgccggcccgccgcatgcgcatcgatcatggcctggtggcgccgctccagcttggccatggcggccgcacccaggcgctgcgcggccagttcacccgccagcgcctcgagcccgtgcagggtctcgaaggtggcgcgcagctcctccaggtccagcggcgccacgcgatagccgatgtactgccggtgcagcaccagcccctcggacaccagcaccttcagcgcctcgcgcagcggcgtcttggagacatcgaaggtctcgcagaaggcccgttcatcgatcctcgcgccgggcggcagttcgccctcttcgatcatggtgcgcagccgggcggcgatttcggccgacatgccgagcgtgcgcaggcgcgtggtttgggaaagcgtttgtgtcacagacgtcaccagattggggaaatgcaccacgacaaggctaccacataccaaaattgtgcatgcgcaacatcgcaaaatcaatgacttacacgcgttgtaattacagattacgtatcctatactccggcctgttgcgcaaaacgccaacagaactgcctcacccaaggactaaaacaggagacgccgtcatgcagacgacaagccgggcgacagtggtcacggaggccaagacctccgttcgctggaagatttttttgatgatgctgttcctcatcgcgatcaactacatcgatcgcgcctcactgtcagtggcgatgccgctgatcgccaaggagttcgacctcagccccaccatgcagggcctgatcctcagctcgttcttctggacctatgcgctgatgcaggtgccgggcggcatgctggccgacaagtacaagccgcgcatcgtgatcgcctgcgccaccgtgttctggggcattgcccaggccgtggcggccttcaccaccaacgccaccgcgctgctgctgacccggctcggcctgggcgcggccgaagcgccgatctacccggccggcggcaagctcaacgcgatctggatgacccagaacgaacgcggccgcggcgccaccctgcttgacggcggcgcgccgctgggcgccgcgctcggcgccatcatcatcacgtggctgatcgccacgctgggttcgtggcgcctggcctttatcgttgccggcgtcggcaccgtgctggccggcgtgctggcctggtactacgtgcgcaactccccgcgcgagcaccgcggcgtgaacgaactggaagcccgctacatcgaggaagcccaggccaatgaacaccgcgccgagccggccaacctgtcgggccgttcgctggacttcttcaagtaccgctcggtgtggtgcatggcgatcggctggatgtgcttcaacaccgtgttctacggcctgctgacctggatgcccaactacctgaacaaggtgcacggcttcgacatcaagcagatgggcggcgccagcttcatcatcttcttcagcggcttcgtgggcgaactgatcggcggctggatcgccgacaagtggaaggaagccggcggccggcccaatgtggtgatgcgcacgctgttcggcattgccgcggtggtggccacggtctcgatcttctcggtggcctacgtcaccgacccgatcgtggtggtcgtgctgctgtcgtcgacgctgttcttcctgcgctggtgcggcctgttctggtgcgttccgtcgatgctcggcacccgcaacaagatcggcttcctgggcggcgtgatgaacctgggcggcaatatcggcggcatcacggtgcccatcatcgtcggcatgatcgtgcagttcaccggctcgtacttcctggcgctgatgttcttcgccgcggctggcgtcggcctgctgctggcttccaccgccatcgactacgagaccaagatcccggtctgaagacccgtcggatcaccgaactccgaaaaaccagcgaaagggccggcaatgtcccggccctcgcaaccactcctgagacaaaaagcaaaatgaccaagcaaatccgcctcggcatgctgacgccgtcttccaacactgcgctcgaacccatcaccagcgcgatggttgccggcctgcccaacgtcagcgcgcatttctcgcgcttcaccgtgaccgagatctcgctgcgcgaccaggccctgggccagttcaacctggacaagatcctggccgccgccagcctgctggccgatgcccgcgtcgatgtcatcgcctggaacggcacgtcttccggctggctcggcttcgacaaggatgaggcgctgtgccggcagatcaccgaagccaccggcatcccggccaccacctcggtgcttgcgctcaacgagatcctggaaaagaccggcgcgcgcaacttcggcctggccacgccgtacctggacgacgtgcagcagcgcatcatcgccaactacgagcgcagcggctttcactgcgtggcggagagccacctggacctgcgtgtgaactacagcttcgccgaggtcgaggaagacaccatccgcgagatggtgcgcggcctggcccagcaccagccgcaggccatcaccaccttctgcaccaacctgcgcgccgcgcacctggccgaagaacttgaagccgaaaccggcattccgctgtacgacaccatctccaccgtggtgtggaagtcgctgcgcctgtgcggcgtggacacgcgcgagctgcgcggctggggccgcctgttccgcgaagtggagtaagccgatgtccgctcacgacagccttgacctggtgatccggcgcgcggacgtggtcactgcgtccgaccgcttccgctgcgatatcggcgtgcgcaacgggcagatcgtcgcgctcggccacgcgctgccgcaaggcgcgcgcgagatcgatgccgatggcctgctggcgctgcccggcggcgtcgatggccattgccacctcgaccagcccatgcccgacggcctgcgcatggccgacgacttcttcaccggcacgcgcgccgcggtgtgcggcggcaccaccaccgtgatcccgtttgccgcgcaggagaagggcgcttcgctcaaggctgccgtggcggactaccatcgccgcgcggaaggccgcgcggtgatcgactacgccttccacctgatcgtggcagaccccacgccggcagtgctggccgatgaactgccggcgctgatccgcaagggctacagctcgttcaaggtctacatgacctatgacgacctgaagctgtccgaccgcgaaatgctgtcggtgctggacgtcgccaagcagaacggcgcgctggtgatggtgcatgccgagaacgccgactgcatctcgtggctgaccgacaagctggtcggggaagggcgcatcgcaccgcgcttccacggcctggcacgtcccgccgcagtggagcgcgaggccacgcaccgcgccatcacctttgccgaactggtcgacgtgccgatcctgatcgtgcatgtctcgggcaaggaagcgatcgagcagatccgctgggcacagggcagggggctgcagatcctggccgagacctgcccgcagtacctgtacctgaccgccgacgacatggccttgcccggcgacgacggctacgaaggcgccaagtgcgtgtgcagcccgccgccgcgcgaccccgagaaccaggcagcggtctggcgcgcgctgaccaatggcgtgttcagcgtgttctcgtcagaccatgcaccgttccgctatgacgacccgcaaggcaagcagccgggcggcgagcggccttcgttcgagcacatccccaacggcgtgccgggcatcgagacgcgcctgccgctgctgttcgacggcgtggcgcgcggcaagctgtcgctgcaccagttcgtcgagctgacctcatggcggccggcacggctgtatggcctgtatccgcgcaagggcaccatcgccatcggcgcggatgcggacatcgtgctgtgggacccgaaccagcgcgtgcagatccgcaacagcgcgctgcaccacgcggtggactacacgccatacgaaggcatcgaagtgaccggctggccggtgcattgcttctcgcgcggcgagatgctggtgcgcgatggccagtaccaggaaccccaggccggacgcgggcagttcctgccggcgggcgcgccgatgcttggttgatgacctgcggacctgaagactgaagagctgtgcaggtttgctgttttcgctgttcgacaaacactatctccccatgcaactcctgatcgtcaatcccaatatcagcgaatccgtcaccgcgctgatcgaagccgaggcgcgccgcactgccgcctccaccaccacgctgaagatggccaccgcccagttcggcgtggcctacatcgaaactcgcttcgaagcattggtcggcggctatgccaccgcctgcgccgccgcggaacacgccggccagttcgacggcctggtggtcgccgcgttcggcgaccccggcctggccggcctgaaagagctgttcgacgtcccggtcgtcggcatgaccgaagccgcgctggccagcgcctgcctgctggggcagcgcttctccatcatcgcgatctcgcaccgcatccaggcgtggtaccgcgaatgcgtggcggccaacggcctgtcgtcgcggctggccagcgtgcgctcgctgcaggagccgctgcgcgatatcggcagcgtgcaggaagaccatgccgcgcggctggagcaactggccctgcaggccatcgagcaggacggtgccgacgtgatcatcgtcgccggcgcgccgctggcgggactggcgcgctcgctgcaagggcgcatcgcggtgccggtggtggatggcgtgtcgagcgcggtgcggcattgcgaatcgctggtggccctgcgcgccggcagcgccacgcagggcagcttcgcgcggccgccgcgcaagcccaatgccggcctgccgccggcgctggcaaagctgctcgactgagcgcaatctagccgtgtgcaaatctgcaatgcgcgtccgcaaggacgcgcattgctgcataaggggggcgatcctagactgcctgcacggccgccgcatggcgtggcggccaggcaaccaccacaggatcgcaatgaagctctactacactccgggcgtctgctcgatggccgtccatatcgccctgcgcgaagccggcctgccggtcacgctggccaaggtcgacctgctccgccacaagctggccgagcctgaaaacggcaccgacgactactacaccatcaacccgcgcggctacgtgccgctgctgcagctcgacgacggctcgcgccataccgaggcggcatcgctgctgcaatacatcgccgacctggtgcccgaacgcgcgctgctgcccgccgccggcacgcgcgagcggctggaagccaccggctggatcacgctggtttcaacggaactgcacaaggtcttcagcccgtggctgtggcacaaggaaaccgcgcagagcacgcaggacgagtgcaaggccaggctgcaccggcgcttttccgaactcgaccagcacctgcaaacccgccattacctgatgggcgacacgttcacggtggcggatgcttactgcttcaccatcgtcggctgggcccgcatcctgaagctgccgctcaacgactacccggcgctgcagcagtacctgtcgcgcgttgcggcgcggccggcggtgcaggaagcgatgcgggccgaagggctggtgcgcgactgaacccggccgcgcagaatcgctcgctcagcgctgcgcgccgagcagcgattcgatcttcgccaccagttccttgtcgtccggcctggtgcggctgccatagctggccaccacctggccatcgcggccgatcaggtacttgtagaaattccacttgggcgtggtgccggtttgctttgccagcagcgcgtacatcgggttggcatcgctgccgcgcacatgcgacttgccgagcatcgggaacttgacgccgtaggtgttgtagcagaagtccgcgatctctttctgcgagccgggctcctgcgaaaagtcattggacgggaagcccagcaccaccagcccgcgcgcgccgtacttggcgtacagcgcctccaggccctcgtactgcggcgtgaagccgcaatagctggcggtattgaccaccagcaccaccttgccggcgtactggcacaggttctgcggcacatcgtcctgcaggcgcgggaaggtgaagttgagcgaggcggggcaggcgcccgcggcaggcgccgcggcgggcttgtcggcggcgcgcaccggcgccggcagcagggcggtgctggccgccgccagggtcagggcggcagccaggctggaaagcaggggacgacggatcatggcgacggggctccggtggtcggctcgctgtatcgggtacgcgtagtttacgccgatggcggcctgacggatgccgcgccggtcagtccatcgccagcgtggccgcgtgttcggtgacgctgccgcgcagctccaggtccggcatgcggcgcacgatcagcagcgccagcaccgccgccgccgcgcccgcggcaaagagcaggtggaagcccgactccacgccgcccgccagcaccgcgcgcacagacggcgacagctgcgcaaaggcctcgctgccgtggcgcagcgcaccgaggtccagcgcctgcgtgacccccgacgccgccagcgcatggcggaattccagcgtcagcagcgtgccggcgagcgccccgcccagcgcgctgccgagcgagcgcagcaccagcagcgcgcccgtgccggcgccggtgtcgcggcgctccagcgcgttctgcacgctcatcagcgtggccaccatggtcatgcccaggcccacgccggccagcgtcatcgccgccagcaccaccgccagcggcaccgccggcgtcaccagcgccagtgcgatcagccccagcgcgccggcgatatagccggcgctcaggatgccgcgcatgcggcccacgcgcggcgccagccacgcgacgataaagttgcccgccacggtggccagcaggaacggcatcaccagcaggccggaggtcgatgcatccgcgccgcggaccagctggaagtgcaggggcagggcgaagatgcacaggaagatatcgagcgcggccagcgccgaggcggccacgcccatcacataggcccggttggcaaacaggcgcggcggcagcatcgggtccgcggcgcggcgctcctgccagatcagcaggaccagggccgccaccgcggccaggagcagggcgcccagctctggcgagagccagtcgtagacgtcgccgccccagctcatcgccagcaggaaggcgacgatggccaccgccagcagcagcgcccccagccagtccacgcgcgcacgcccgccacgcggcggcagcatggccagcccgcggtagcacatgaacatcgccagcaggcccagcggtacgttgacccagaacagccagcgccacgacatatggtcagagacccagccgcccaccagcggcccggcgatcgacgccaccgcccacaccgtggccaggtagccctggtagcgcccgcgctggcgcggcgccaccacatcggcaatggctgcctgcgccagcgacatcagcccgccgccgcccacgccctgcagcgcgcggaacaggatcagctgacccagcgtctgcgccagcgcgcatgccaccgaggctccgataaacagcgtgatcgccaccatcagcaggcgccgccggccaaagctgtccgacagcttgccgtacagcggcgtggtcaccgtcgacacgatcaggtacgccgtcacgatccatgacaggtggctgaagccgttcaggtcattggcgatcgccggcaccgccgggatcaccacggtctggtcgagcgcggccagcaggatgcacagcacgatgccgccgatcacccgcatcacggcgcgatggtcgtgggcgggcagggccggcgtggtgtcccgggcggatgcggcaaaagagggtgaagacatggacaggcacgagaccgcagcgatgtgcggtgaaagctacgtcaaatgcagggaatatcggccgggaaccgcgcaatagggggcgtgacgccgtcgcgggtggcctaattcagcgaacgcataattatatgcggccagcaagtatcgcgctcgtgacccggatgtctggcacgtcacttgcgtgacaaggatcaggcacgatggtcgatgcaagatcacatcgccactaccgaaggtaagatttcgtcatgaccgagaccccacgacacgaagcaggtcaggccgccgatgcggccgggcccgaactgggccagtggcaccccgtgctggccatcgaacaggccgatggcgacggccccttcgccgcacggctctttggccgcgcgctggtgctgtggcgcaatgccgacggctggcacgcctgggacgaccgctgtccgcaccgcggcgccgctttcacgctgggcgccgtgcacgatggcctgctgcattgcggctatcacggctggcgctttgcctcgggcggccgctgcacgcgctatcccgcccacccggaactggtgcctgcgccgcgcgcctgcgccaccacgcacgcggtgcgcgagggctacgggctgttatgggtacgccttggcggcgacggcaccgaggccgtgcccgaactgccgtccttccccgagtaccacgacgccgaatgccgccgcgtggtctgcggcccctacgacgttgccacctcggcgccacggctggtggagaacttcctcgacatggcgcacttcggctatgtccatgacggctacctgggtgacccggcgcacaccgaagtgccgccctatgaagtggaagccatcggcgatgcgcgcaagcccgacgcgctgcgcaccatcggctgccgcgcctggcagccgcgcgcgcacgccagcgccgccggcggagccatggtcgagtatgaataccgcgtggttgcgccctacgccgcgatcctgaccaaggtgcccgaccttggcgacaaccatcgcggcgccatcgcgctgtttatcggcccgcgggacgaggaatcgagccgcgtgtggttcgtgatgtcactggtgacagacgatgacgacgccagcctgcgcgaattccaggacaccatcttcctgcaggacaagccgatcgtggaatcgcagcagccgcgccgcctgccgttgcgcaccggcgtggaggtgccccagccggcggacaagctggcaggcgcgtaccgccgctacctggcggcgcatggggtgaggttcggcacgctgggctagccggcggccgcgcgcgggagagtggacggggcgggtgcgtgcaatgcgaccagcccccgaacacgacaggcctagcgcccgcccccggtgatgtaatgctcgagctgctcgatgatgaactgctgctcggagatgatgtccttgaccaggtcgccgatcgacagcatgccgatcagctcgtcgccttccatcactggcaggtggcgcagccggtgtcgggtcatcaatgccatgcattcgtcggtggtctggctggcgccgacatagatcactgcattggtcatgatgtcgcgaaccagcgtctcgcgcgaggtgcgctgcatcaggatcaccttgcgcgcatagtcgcgctcgctcaggatccccaggatctcgccatgctcgatcaccagcagcgcgccgatgcctttctccgccatcagttgcagcgcggtatagacggtcgccgtgggcgggacgctgtaaatggcctgactcggcttggactccagaacctggcgtgcggttttcatcaccaactccttttccgtcgacaatgcaatgcggctggcggtgccaatgcaatcagagtagcaaagtaacgcgcgccgttacagggtgacttacgcgaatctttgtaagcaatgttgtgacgcccgcatggcagccgccgggtcaaggttgcgcatcggtcgctttttcgtccagtgccgccaggcacagcgcctgcatttcggacacccattgcgccggctgcagcgccgcgccctgcagcagcagccgatagcggcgcgccccccagaccgccagcaccagtgcctgcaccttcgcggcatccggggccgtgggcaagtcggggcaagcgcacagcgcccggcgccaggcctcgcagaactcttcgaacacgcgccggtggtgcttgggctcggcgatgcgcggctccagcccgatgatgtcggcatcgaagacgatgcccgtggcctcgtcgtccgcaccgcaggcgatggccaccagccgccgcacgcgcgtgcgccagtcggcgtcagcccgttgcgtgacctcggcgtcgatgcgcgccagcatggtctcgaccgtgtggcgcacgtagcccgacgccagcgcttccttgctgggaaagtactcgtacagcgtacccaccgagaaccctgcctccagcgccaccgcgcgcgtggtcacgccgtcccagccatcgcggcaccagatccgaacaaaggcgtcgtagatggcgttgacggtgaagtgcgcgcgctgctgcgaagggcgcttgagcggcttgctgcgcggcgtggcgggccgtttcaggtcgccggcggcgggcgcttcgtttccgaacccggcggcgttggcgcggcgatagattcttggcatcggcctcacggaagtcatggcgaacattgcacgccggacggacgggccgcgaaccaggagaagacatggcagcaactgaaccgacccttgccatcacgcggctgttcagccgcaaggatgccctaaacgaaagccggctggaagccgcgcacgaacccgccagcgccgcgcccggcgaagtgctgctgcgcctggaccgctttgccctgaccaccaacaacatcacctatgccgcctttggcaaggccatgcagtactgggacttctttcccaccggccagccgcagtggggccatatgccggtgtggggctttgccgatgtggtggcctccggcgtcgacggcatcgcccccggcgaacgcttctacggctacttccccatcgccagccatttccgcatgcagcccgggcgcgtcaccgcgcgcggcttctacgatgccgcggcgcaccgcgcaaagctgacctcggcctacaaccagtacacccgcgtgcagaacgacgccgcctacgcgccggaactggagcactaccagatgctgtaccggccgctgttcatcacctcgttcatgctggccgacttcctggaagacaaccgcttcttcggcgcacggcggctggtggtgtccagcgcctccagcaagacggcctatggcaccgccttctgcctgcgcgacctcgacggcatcgcgctgaccgggctgacctcggcccgcaaccgcgcctttgtcgaagacctcggctgctacggcagcaccgtcacctatgacgaactggcatcggtgccggtggacgagcccacgctctatgtcgacttctccggcgatgagtcgctgcgcgcgcgcgtgcatgcgcattttggcgacagcctggtgtacgactgctttgtcggctcgacgcagaacaccggcttcctgcgcgacctgcacctgcccgggcccaggcccgagttctatttcgcgccggtgcagatccgcaagcgcaatgccgactggggaccacaggaagtgaaccggcgcttcaacgcggcgcagcgccgctttatcgaccatgcgcgcgatccggccaagcgctggctggcgctggtggaggaacggggattcgaagccgcgcaggcacggatcgcgcggctggcggcggggagcggggcgccgcaggaggggtacgtggtggtcgtggggtaaaagcagaacgggccccgcatggggcccgtctttcactccgtcagcatccgcaccttcaccttcttgcccttgaccttgccggcattgagccgcttcaccgcctcgcgcccgatgctgcgctccaccgcgatataggtcgacatctccagcacattgatcttgccgatctgctccttggtgaagcctgcctcgccggtgagcgcgcccaggatgtcgccggggcggatcttctccttgcggccacccagcatctgcaaggtcaccatcggcggcagcaggcgttcattgctggcgggcctcaggtcggccagcggctgccattcgaattcgccgccgtggtgctgttccaggttgcccacgcggcccatctcgtccatgctgaccaggctgaaggcccagccttcctggtcggcgcggccggtgcggccgatgcggtgcacgtgcacctcaggatcgggcgtgatctcgacattgatcacggcctcgagctgcgcgatatccagcccgcgcgcggccacgtcggttgccaccagcaccgagcagctgcggttggcaaactgcaccagcacctggtcgcgctcgcgctgctccagttcgccgtgcagcgccagcgcctggtagccctgcgcgcgcagcagttccaccagctcgcggcagcgcgccttggtattgcagaaggccagcgtgctgaccgggcggaagtggtccagcaggcgccccaccgtgttcaggcgctcgccttcctcgacctcatagaagcgctggcggatggtggtgttgtcgtgcgtagcctccagcttgaccgactgcgggttgcgcaggaaacggtggctgagcttgtcgatgccgggcggatacgtggccgagaacagcagcgtctgccggtccttcgggcagcggctggccacataggcgatgtcgtcgaagaagcccatgtcgagcatgcggtcggcctcgtccagcaccagcgtgttgatgccggacagatccaggctgccgcggtcgatgtgatccaggatgcggccgggcgtgcccaccacgatatgtgcgccatggatcaggctgtcgacctgcggccgcatcggcgagccgccgcacagtgtcagcaccttgatgttctcttcggcgcgcgccaggcggcggatttcctgcgtgacctggtcggccagctcgcgcgtggggcacagcaccatcgcctgcacatcgaagcggcgcggatcgagccggtgcagcagcgccagcccgaaggcggcggtcttgccgctgccggtcttggcctgcgccaccaggtcctggcctgccaatgtgatcggcaggctggccgcctggatcggcgtcatttcgtcatagccaagctgcgccagcgtggcgagcatggtgggcgacagcggcaggttggaaaaagcggtgccggcttgcggctgggcgggggtcgagttcatgcgcgattatagcgatccagggatgtcgatccgtcagtcatcggccggcggcgtccagtccagccgctccagcagcgcctgcgccgcggccggcgcgcgttccttggcgccgttgataaagaagacaaagacttcgcgcttgcgcgcggcggtcttgcggtcttccaccgtcggcaggtcgtccggctggtggccctgcgcccacgtgcgcacccgcgcagcccacgcatccaggtccctgggcgcatagccggccttcagcttcgcgctgctggccatcagccgtgcatagacaaagtctgccgtgagatccgccatcgacggaaacttgggcgaatcggtaaagaccgtggcggccttgtacttgcgcgcgagcttgaggtagtccggcgactggaagctgtcgtgccgcacctccagcacgtggcgcagcttcacgccttccaccgaatccggcagcagctgcaggaaggcctcgaagtcctccgcatcgaactgcttggtgggcgcgaactgccacaccaccggccccagcttgcggccgagctcggcaatgccgctgtcgatgaagcgttcgatcgattcgccggactcggccagcacgcgccggttggtggcaaagcgcgaggccttcaccgcgaacacaaaatcatccggcgtgtcgtcgcgccatttggcgaacgaggtgcgcttctgcgtgccgtggtacgtgctgttgatttcgatcgcgctgaggtggcggctggcataggccagctcacgcgcctgtgccaggccggcgggatagaagttgtcgcgccacggggcgaaattccagccaccgatgccaacccgcaccggctcggtggacgtggcggctttgcgtgacctggccttgggtgtggcctctgaggttgctgcagtcctggatgcggccttcgccgcggtgcgtgctgccatggcgcgatctcccgaaacgcgagactggcagtctagcgggaaactgcgccaggcggtggcggcgcaaacacgcccctggccaacaaaaaaagccggaagagggccaggcccccttccggctccgttcccggtcccccggaatcagaacgagaaattcaccagggcgtcggcagcgctcacgtccgccggctgggtctgcaccgcacccgtggcgctggtggcctgcacgctgtacttgcccgcggcagcgccatccggctgcagcggaatcggcagcgcggcctggtaggtgccgatcaccggagcggccaccggcagcgccggttcggtggcaaacatgctgtaggcgccggtatcgctggcggcagccgtcgccgcaatctcgaaattgccgccattgaccagttgcagcgcgcgcagggtcgcttccgccgaaaccggcgtgaccgaacccgaaacccggcgataggtcgacgccggcagcgacatcggtgccgccgcggtcgagatcgccgtgggcgtgcccaccaccaccggcacggcgcgcacgatgcccgccgccttgccattggcagaacccggcaccaccaccacgtcaactggaccggccgtgctgctctgctcgatcggtgacagcttgaagttgccgttggcgtccgccaccgtcgacttcaccaccacgccgttgcgctcggcatagacgcgcgcacccggtgccccgctgaccacgccgttcacttcaccgctgacggtcatcgggatcgccgtcaccaccggcttcaggccaaaggtgccattgccgcgcgtgaccaccgacttgcacgcgtcaaagtccagcaccaggtcggtcagcgtacccgctgccacggtgaacggccgattgatcttgatgcccgactgcaccgcgctaggcgtatccagcgtctgctcagtgccgccgatgggcaccaccgagttggccagcgcaccggcgccgccgccacggttggcatcgagcaccaggcgcacctgctggtagttgccggcaggcagcgcggcctggcccagcaccgtcatcacgccgttggtcagcgacagcaggtcgatcttgcgcgcgggcacgacgtcgatatcgacccagcccccggcgctcgtctcggcgctggcgctgctgtgcacgcgcaccttgttgacggtcacgaagacattgttgaagccacaggccggcgcatcggtcatcgagaccttgagcgtgccctgcccgccgccatcatcgccaccaccaccgcaggcggccagcgccagggcaccgctcaaagcaagcacgcgcatcggcgcggaagtcaaggaaaggactgacacggtaggctctccgtttgggttatttgtgagttgatcggaggatatgttgccgatcgcataacggctgtaagtctttgtaatacgttgtgaaaaagtcgttagcttgtctgatgactgatcagaaaggcttgacgacatatgtgatcccgcccaagccgccgtcggatgcgctgcggcaagcgttctgctgcggctgccgtcatgcccatgaacgccgtatcaacatcatcgctgcattgcaacgccgcttgtattgcaacgcatccgatttggcgtttgatcaggccgaaacccgctcccacccgctcctgcgtgtgttcgcgttacgaatgcagatccaccagcgcgcattcccgaaccgcgcaagcgcactatcgtgcaccaacttggcgtgttgtgtcgtcaacctgatcacattcgacagggtttctcctgtcggcctcaagtcgggcgcacccgctccgtatacagcggggtggaaatcccacacacaaacgcccccaaacgattccctacgaaggatctcccctgatgttcactaccatccgtgcgcggatcgtggccctgtgcgtggccatcgtcatcgccgcgctcgccatcaatacggcgctgaaccagttcgtcgccaaccgctataacgaagacgccatcgacagtagcctcgcggcagtgcagagcggccacgccagcgccatcgccgactgggtggcctcgcacagccagatgatccagtcgctgcaggacgccatgctgcagcccgaacccgatgctgcgctcaggcagattgccgacgccggcggcttcaccaacgtctacgtcggctacgccgacaagaccgcgaagttctccaacccgcaaggcatcccgcccggctacgacccgacaggccgcccctggtaccagcaggctgccacggccggcaaacccgtggtcacgccgccctatgtcgatgccggcaccggcaagctggtggtggcatttgccgcgccagtggtgcgcgacggcggcgtcaaggccgtggtgtccggcgatgtggcgatggacagcgtgatcgccaacgtcaaggcgatccaccccacgccggcaagcttcggcatgctggtggccaggaacggcgacatcgtcgcccacaccgacgacaagctcacgctcaagccggtgacggaactcgcgcctgcgctgaacgccgacaagctcgccgcactggccggcgcaaagacgccgctggaagtcgaagtcggcggcagcgccaaactgctcggcgcgcgcgccatccccggcaccgactggatggtcatcgtcgccctggacaaggccgaggccaccgccggcatgcgctcagtgctgatcgcatcggtgatcgcaatggtactgatcgcaggcatggccgccgccgtagtgtggggcgtggcaacgatgtcgttgcgcggcctgtccaccgtgcgcgatgccatggacgccatcggctccggcgacggcgacctgacccagcgcctgcccgccgacggcaacgacgaagtcgcgcagatcgcgcgcgccttcaacacctttgccgacaagctctgcaccatcatgcgccagatccgcgacgccagcgaatcggtgcgcgccgcctccgacgagatcgccgccggcaacacggacctgtcgcgccgcaccgaatccgccgccgccagcctgcagcagaccgcggcctcgatggaagaaatcaccgccaccgtcagccagtcggccagctcggcccagcacgccaacgaatccgtcaccgcggcctcgcgcgtggccgccgacggcggcgtcgtgatcggcgaagtcatcaccaccatgggccagatcgagaacgcctcggtcagggtctccgacatcatcggcgtgatcgaaggcatcgccttccagaccaacatcctggcgctcaacgccgcggtcgaagccgcccgcgccggcgaccagggccgcggcttcgccgtggtggcgggcgaagtgcgcgcgctggcccagcgcagcgcccaggccgccaaggagatcaagaccctgatcgaatccaccgtaggcggcgtcagctccggctccggccaggtccgccgcgccggcgacaccatgagcgagatcgtcagcaacgtctccagggtgaccggcattatttccgagatcactcaagcagccatggaacagacccgcggtattcaagaggtgaatatggcggtgagccagctggatcagatggtgcagcagaatgcggcgctggttgagcaatccacggcggctgccgcggcgctgcagacgcaggccgggagcctggcgggggcggtggggcagttcaggttggggtgagattggctccatccttaagctaatctccgcaaattctgcggagaatggccccgccagactccgcagagaccaaaaaaggggccattcgaaacgcttgttcagggcggaacgtcagtccattggaagcccgtgggcatgcttccttccaccaatcgcccccgacgccgccgcccgcaggatccgctggaacgtcgggcactccatatgccttggcgccggacaaaccgccgcatgccgcagtccgtcgcgcatcgccgtcagcttgcggatggtccggtccagctcatccgccttggccgccagcacctgccggtcgatgttcggctggccctgtggcgagaacatccgtgcgatgtcatccagcgagaaaccggcggcacgccccagtgcgatcagcgccagccgctccagcacgccggcatcgaacacgcgccgcatcccgcgccggccgatggacgcgatcagccccttttcctcgtagtaccgcagcgtcgaggccggcacgccagcctgccgggccacttccgcaatatccaggcttgtcaccgcttgacctcaagtcgacttgaactggcacagtgtagcttccatgccagggcggcgtgcaaggagatacgaccatgggtgagcaacagcagaccagcagcaacggcggcgaccaggccgcactgtggaacggcccgtccggccatgcctgggtcgcggagcaggcggtgctcgacgacatgctccggccgctggaaggccggcttgtcgatacggtgggcaagacttccgcgcagcatgtgctcgatgtcggctgcggcaccggcagcactacgatcgcgctggcgcgcaagctcggcgcgcaaggcagatgcaccggcatcgatatttccgagccgatgctcgccgctgcacgggcacgcgcgcaacacaacggctcgaccgccagctttattcgcgccgacgcgcaggactacgccttcgcgccagcaagcttcgacagcatcgtgtcgcgcctgggcgtgatgttcttcagcgatccggtgcgggcctttgccaacctgcgccgggccgcaacaccggatgccacgctccactgcatcgcctggcgcagcgcctcagagaatccgttcatgaccaccgccgagcgagcggccgcaccgctgctgtccaacctgccgccgcggcagccgggggcgccggggcagttcgccttcggcgaccgccagcgcgtgcaggccatcctggaagagggcggctggggcgggatcgatgtcgagccgatcgacttcgcctgcacgctgccggagcctgcgctggtggactacctgtcccgcctgggtcccgtcggactggccctgcgcgaggccgatgcaagcacacgcgccagcgtcatcgaaaccgtccgcgcggcattcgagccttacgttcatggcgcaactgtgcgctacaccgctgcctgctggatgatcaccgcccgcgctgcggcttcatcactgaccgccggcgagtctgcccatgcctgatacagcggtggccctcctgctcaatgcaatcgtgatcggcaccggcgcaacgctggtgatggacgcctgggccatcctgcgcaagcggctgctgggcgtccctgcgctggactatggactcgtaggccgttggctcgcgtggctgccgcgaggacgcctttgccaccatcccatcgccgcatcgccgccggtgcgcggcgagcgcgggatcggctggatcgcgcattacctgaccggcatcgtgttcgcggccatcctgctggggctatggggactcgactgggcacatcatccgacgctggcacccgcgttgatcgtcggcatcggcagtgtggcggcaccgttcctgctgatgcagccggcgatgggtgccggcatcgccgcgagccgcacgccgcggccaaacgtggcacgggtgcatagcctggtgacgcatgcggtgttcgggctggggctctatgtggcgggttgggtcgtgagcctggtagcgaactgacaagcgggcacagcggcaggctgccgttgtcagatccaaggccgaggagaaacctccgcggctttccggatttatggcctcagccaggcatcggagaccgcgcccaaagtttgccgcccgcttctgtgggctatcgaaccgtagattgctggcgccgctccagaatagaagtccatcggcgcccgcttcagcgccggacgatccccaccatcacgggcgacaggatgacaaggctttcgggccggctggctgcgtgcatcgcgttcggccttctgctggctgccagtgcgcaggcgtcggatatagcctgcaagaccacgctgcgtccttcccgctgcgacgatccgctcgccgccggcacgtcctgcctgcattcagtgccacacgccgccgacctgatctgcgatcacgcgatgctccatcgcgaacatgagcgcatccacgcggaccagcagcgccggctacgcgccggcgcgattcaaggaagcgacatcgccgcctggcgggagcgccgggacgcctgcacgtcggtggcatgcctggaccgggtctttgccagctggcggcggcagccaggcaagaaaccaccgcgggctgccgcgccgcaaccaacgccgccggcggcgcgggcgcgggaggtgtcgaggaacaagcaggctgcggtcagggtcgaggcctcgcggccagcggtcgcgccaccttcagcgacgccagcgactcaaccagcagcggagcagcttccagctccaccaccgtcagagccattggcagaagcggggattcatgcgccccctgtggtgatccaaagagcctccggcccgacgctccagcaagcttcaattcgtccgacgccggcgccgcaaccacgcggctgggcatcgctgggcacgctggcgtggctgggcatgtgcggcgcgggcgtcgcctgctggtcccggcgtacgcgcggcgagtggctgccgggggtcacccgcctgcgcgagcggactcgggatgcgccgcccatcgtgctgttggtgagcggactgctcgctttgaacggggtactgctgttgtgcgtcctgacggcgagccggccattgtcgtgagctcatgccgttgcgccgtcccatgcaggcgcgggcgcagtcttgcaccagcaaagcaggatgctcgccgccaggcgcaggccgctgaatggatgcatcaggcaatgccgcacctgctcgctgcggctttcgccgtacaggcaccacatgcagaagtgctcgcagttgttggtcagcaggcggtagcagtcctcgcccaaccgtgagcgggcgcggccgacggattcagcggcactgtaccgcgccatgggcgtgctcaacaccgtgatgccatggccggcagcaaaggcggccaggctcagttcttccaccgggccgcgctgctgccggtggcaatagccagcgtagtgcaccaccatgccacgcccgacgtagatgccgtggtgtgcatagccatgacgcggcgtgaccaggtgtgcgccgaggtgcggctctgcatcggcggcgaggcgcgatgccagtacgtgcgggctgcgggtggcctgcgccgttgtcttcgtcgtttcaccgagggatgccatcaccgtctccattgcaggcctctgccgggccatgccctatgaccgcatagggcgtgccagtgacggatgagatcggcgcctggtggtgcgggcgttgcgtgaaggggtgcgaagagaaggatgcgagacacggcccgatgcagagcggccgcgcatcgcagaaacagggcccggccggtttgatcaaatgatcaaactccgagcaccgccacgatcaattggatcaaagcatcaagccgccggcaaggcatcgcgacggcggcgacaaacctgcgccgggcggctcattccggcagcgggtacttcctggcgttcatctccatcttggcgcggatcgccgcgtccaggtccacgcccagcgccgtcaccagctgcgccaggtagatagtgatatcggcaagctcctgctccacatgctcgcgctcgtcggtggacatgatggcgcgcgattccgcgtcggtctgccactggaagatctcgaccagctcggacacctccacgctcagcgccatcgcgaggttcttggggctgtggtacttgccccagttacgggccttgccgaagtcttgggcggcttgctggaggttcttgatgtcgatcaggggcatgatggtgtgacgaaagcggttcactgcgccccggcatgcgccggcgcaagacgcagatttaatcacgacccggccgtcctcgacacccgggccgcctgaggcttacccttcgcttgtgcatccaccgtctcaacggaggttccccatgcgcccgactcccggcctggcaattgccactctcgccggcacgctcgcctacctggccatcgcgattgcaggctggggtggcatcgcccccttcttcgcgcacccggcgcgcgtggccctgaccctggtcctgttcgccctatccatcgccgcgctcttctccggcggcaatatcagcagcggcatgcgcgaggaccgcggcaaccggtgggtgctggcagtgtttggcgtgctcgggctgctggcggcgtacctgccgccctttaccgaccgcatcggcttctggacgctcgatggcgacaccatgcgctggaccggcgtggcgctgtttgccggcggcggcgtgctgcggctgtggccggtgtttgtgctggggcggcgcttcagcgggctggtggcgatccagcccgggcacacgctggtgaccaccggcatctatggcgtgatccggcatccgagctacctcggcttcctggtcagttcgctgggatgggtactggcattccgctccggcgtgggcgtggtgctgacgctgctgatggtgccggtgctggtggcgcgcatccgggcggaagaagcgctgttgcgcgaccagtttggcgacgagtacgcgtcgtactgcgaccggacctggcgcatgctgccgggcatctactgagcacggggcagcggcgccccgcgcacttggcggatcaaatcgccagccaccaagggttatccctagtcattcattcccattttccgggactcaaggttttgatttatgggaatcaggtcctattcttgggccctatgttgaatgccgtcgacaaccccactgccgtgaagcccacgacacccacgcctgccgaacccgcccagcccgcgggcggtgccgatcgcgtgctgttcgtgctggcggcactggcgcaacacggcgcgccgatcacggtacgcgagctggttgccaaaaccggcctgcccaagagcacgctctaccggcaactgatgatgctcaagcgctggggcttcgtgctggagtccgacggcgaatacgcgccgggcccgatcagcctgcaactggcgctcggctttgacatggcctcgcacctggcgcgcgaagccttgcccgacatgcagctgctggcgcagcagtccgatgaaagcgtaggcctggtcgtcgccgtcaaggatcacgtggtgtgcctggagatggtggagagccgccagtcgctgcgctgctcgttcgagaagggccgcggcgtaccgctgcgcgccggtgcgtcggccaagtcgctgctggcgttcatgcgcgacgaagcgcgcgagcgcctggtccgggcccagtgcgagccaggcgaagccgaacggctgctggccgagctggccgccattcgcgagaccggctacgccgtcagcgagggcgaggtggatccgggcgtgtggggcgtgagcgcgccgctgttctcgcggcgcagcaaggccgatgcgctgggctcgatcacgctgatggtgccggccacgcggcggcaagggcgcgagtccgcgctgatcgacatgaccgtggcagcggcgatgcggatttccgcgcggctgcagtcttactgaataccaagcaattcgttaccgccgccgtcggcaaacccatgcgacggcagatccctcgttcccgagaataggagacttccatgaaccttcgtcgcaaatgcctgatggccggcctggcaaccctgaccgccctgaccctcggcaccgccgcgcaagcgcaggacaatgccgtgctgcgcgtggccaccgacgccaccttcccgccgatggaatttatcgagaacggcaagcgcaccggctttgacgtggagctggtggaagccatggccaagacgatgggcaagcgggttgagtggaccgacattgacttcaagggcctgatccccgggctggtctcgcgccgctttgacatggcagtttccggcatctacatcacacccgagcgccgcaaggtggtggacttcaccgagccgtactacgtcggcggcctggtggcactggtcaagagcggcaacaccaccgtccacgccccggccgacctgaacggcaagaaggtcagcgtgcaggtgggcaccaagtcggtcagcttcctgcgcgacacgtacccgcaggtgcagcgtgtggaagtcgagaagaaccaggaaatgttcaacctggtcgagatcggccgcgccgatgccgccgtgaccggcaagccggccgcgatgcagtacgtcaagacccgcggcggcctgcgcatggtggagcagcagctgaccaccgaggaatacggcatggccgtgcgcaaggacacgcccgagctgacccgcgccctcaatgcggcactcgccaaggtgaaggccgatggcacctacgccaggctgacccagaaatggttcggcacggccgccaagtaagccgcgcggatcatcatcatggaattggatttttctcctgtctttgccggctggcatgacattgtccacggcgccgtcatcaccgtggaggtgacggcctgcgcgctggtgctgggctgcgtcatgggcctcttggtcggcatcggccggctggacccgaagcgccgcgtcatctacagcatctgcaccgcctacgtgaccttcatccgcggcacgccgctgctggtgcagctgttcctgctgttcttcgggctgccgcagttcaacatcctgctgccggcctttgtgtgcggcgtgatcgggctgggcatctattccggcgcctatgtctcggaaatcgtgcgcggcgcgatccagtccgtggacaagggccagatggaagccgcgcgctcgatcggcatgtcgtccggccaggccatgcgcgcggtgatcctgccgcaggccatcgtgcgcatgattccgccgctgggcaacgagttcatcgccctcatcaagaactcggcgctggtgtcgctgctgaccattgccgacctgatgcatgagggccagaagatcatcagcgtgtcgtaccggtcgctggaagtctatctggcgatcgcgctggtttatctgatcctgacgagcgcggccgggctgatcctgcggcgcgccgaacaacggctgcgcatgggaggcatggtgcaatgagcgattccgcaatcatccggatccggaacctgggcaaatcgttcggcagccataccgtcctgcgcggcatcgacttcgatgtggagccgtcgcaggtcgtggtcgtgatcggccccagtggctcgggcaagagcaccttcctgcgctgctgcaacggcctggaacaacccgaggccggcaccatcgacatcgtcggcaagcgcctggtgaccgacggccagctgatcggcgagcacgagctgaaccagctgcgcaccgaagtgggcatggtgttccagtcgttcaacctgttcccgcacctgtcggtgctgcacaacgtcacggtcggtccccgcatgctgcgcggcgcctcgcgcgaggaagccgagcgcaaggcgatgggcctgcttgagaaagtcggccttgcgcacaaggcccacgccatgcccgccagcctgtcgggcggccagaagcagcgcgtggccattgcccgcgcactggccatggaaccgcgcgtgatgctgttcgacgagccgacctccgcgctggaccccgagctggtgggcgaagtgctgcaggtgatgaaggtgctggccgccgaaggcatgaccatggtcgtggtcacccatgaaatgggcttcgcccgcgaagtggccgatgtggtggtggtcatggatggcggcggcatcatcgaggccgggccgccgtcggtcatcttctcggcgccgacgcaggaacgcacgcgcggcttcctgcaggccgtgctgacgcgggcatgacgatggctctgacccagaacctctggcagggccgtgtcgacgacggcgagcgtggcgacaccacgcgcctgttccgcatcgtgcacgtgctggaagcagcggacgtgacaccgctcgacggcgcaccggtgttgctcggcttcaattgcgacgcgggcgtgctgcgcaaccagggccgtcccggtgccgcgcacggccccgacgccatccgccaggcactggccaacgtgccggcgcacgggctgcccgcgctatatgacgccggcaatgtcagctgtgacgacggcgacctggaatcagcccagctggcgctggcgggcaccgtgcgcgacgtgctggcgcgcggcgggctgccgctggtgctgggcggcggccatgaagtggcctggggcacgtggcaaggcctgcgcgcgcacctggatgcgcaggacgatggcgggcgcgtgctcatcatcaatatcgatgcccactttgacttgcgcaccagccggcccgcaagctccggcacgccgttcgaccagatcgccaacgcctgcgccgagcgcgggcagccgttcgactatgtctgcctgggcgtcagccgcctcagcaacacgccggcgctgttcagccgcgcggatgcgctgggcgtctgctacgtggaagacgtggacatgcaggagcggcacctggaatcgcgcctggccgaactggcggcgcgcatcgatgccaccgaccacctgtacctgaccatcgacctcgacgcgctgccggcggccgtgatgccggccgtgtctgcgcccgcggcctgtggcgtgccgttgacggtggtggaggaaatcgccatgcttgcccgccacagcggcaagctgcgcgtggccgacctggcggaatacaacccgcaatacgaccgcgaccaccagggcgcgcgcgtggcagcgcggttggcctggcgcctgttcggctgacaggcaagtcacccccagccgcccggcggttggcaccagccgcgcccggctatagtattgcccttcgctatatttagcgattccgatcagaattgataaagcgaggcgagggcagtcctgcgccggcgcggccgtcctgccgcgcccccgggccgcccatcgccggttacgggcggaagggtctgcgtgatcgaacaaatcgtcatcgtcggctttggctgcatcggccaggccgtgctgccgctgctggaacgaacctggccgcgggcagcgattaccgtggtggaccgcgtgctcgacggcacgcgccggcaactggccgcccgccacgggctggatgccatcgacgccaccatcacggccggcaactttgaagcgatgctgggcccgctgctgcggcctggcactttcctgctgaacctggcaccgtccgtctgcagccgcgacctgatcgcgctggcgcaagcgcacggcgcgttctatgtcgatgccggcatcgaaccgtgggactatgaagccgacccgcaggcctcgcacctgagcaactacgcgctgcgccacgagatgctggccttcgcccgcggccgtgagacgcagccgaccgcgctggtggcgcacggcgccaaccctgggctggtctcggtgctggtcaaggccgcgctgatggaactggccggcaatatcggcttgaatcagcccgagccccacgaccgcgccggctgggctgccctggcgcgcgcactggacttgcgcgtgatccagatcgccgagtacgacagccagcaagcccccggctatccgcgcgacggcgagttcgccaacacctggtcggccgaaggctttatcacagaatgcctgcaggacgccgaactcggctggggcagccatgagcccgcgctgccgcccgatggctatcgtcacggctacggcagcggcgcggcaatcgcgctggaccggccagggcatcgcacgcgcgtgcggtcgtggtcgccggtgcatggcccgttcgatgcgtacctgatcacgcacaacgaatcgatctcgatcgccgaatacctgaccgaccagtctgccggccagccgctgcaccgccccaccgtctactatgcctatcgcccgacatccgccacgcagacctcgatgcaatggctcgacgaacgcgccgccccgcgcgtgcgcggcgaacgcatcctgcgcgacgagatccagtgcggcgaggacgaactgggcgtactgctgatgagcggccgccatggcgcggtctggtacggatcgcgcctctccacccaacgcgcgcgttcgctggcgccgtacaacaccgccaccagcctgcaggtggcatcgagcctgatcgccggcatgcagtggatgctggccaacccggcgcgcggcgtggtggaatcggatgcgctcgactttcgccccgtgctggccgatgccgcgcactggtgggcaccgctcagcgtgcagttctccgactggctgccgcggcccggcgccacgtcgctcgccttcaccgacttcctgctggacgatgccatgacccagcccgatccatcgcccctgaccatggcctgctgatgcaacgcatcccccagaccccgcgtcgcaactggccgcgcgaactcgagaaagtcggcttccacttccattcgctcgacgaattcaacgtcccgcgcgaagtcgatgacaacaccttcttctactggcgcgaagacgccgcctacgccttcagcaagcaggaggtggagacgctctacgccgccgcgtacgacctgaaccagcgctgcctggaagccgtgcagcacgtgatcgaccacgacctgttcgcgcgcctggcgatcgacaaggacttcgcgcagctgatccgcacctcctgggaccgcgacgagcccacgctgttcggccgcttcgacatgacgctggaccagcacggcgtgcccaggatgtacgagttcaacgccgacaccccgacctcgctgatcgaatccgccgtcgcacagtggtactggaaagacaccgtgcagccgcaggccgaccagttcaacagcctgcacgacgcgctggtggcgcgctggcaatggctgcgcaagcactaccgcaacgccagcatgctgcaccttgcgtgcatgttcgacagccaggaagacatctgcaacaccgagtacctgatggacaccgcgctgcaggccggctggtccgtcaagctggtcgacctgcaagacatcggcaccgacggccgcggcaacttctatgacgccgacaacgtgccgatggaagtcgtcttcaagctctacccgtgggaatggatggccacctccgactaccgcgaccagctggcacacagccccgtgcgctgggtcgagccgccgtggaaggccgtgctgtccaacaaggccatcctgccgatcctgtgggagctctttcccggccacccgaacctgctggaagccagcttcgaccccagccacttcgccggtcagccgcacgccaaaaaacccttcctgtcacgcgagggcgagagcgtgaccctggccaccccggatggcggccacgtccacaatcccggcgaatacggcgccgaaggcttcatctaccaggcctacgccccggcgcgtcgctttgacggccgctacaccacgctgggcgtatggattgtcgacgacgtgcccagcggcctgtgcgtgcgcgaggaatccgggcccatcgccaagaacaccagtttcttcgttccacactacttcatgaacgagtaaggaccgatggcaaagaagaacaacaacggccgcaagccgtcaaagtacgacagcccgtaccagcccaagtcgaaaggatcgccccggtccgcgtggcagccgcagccctatgcgggcgagcagaaacgcagctcgcccgcgctgtggatcatcggcgcctgcgccgtggtggccggcgtggcggcactcggctcctgcagcgacgacgccgacgacgatcccggcgtgaccgtacgccgcgccagctacgccacgctggaagactgcgaagccgactggaacacccccaacgactgcgaaagcgtgccagtcgacgaccccagcaccatctacagctccagcctgaacgcatccgccagcgacgccgccaccggcggctccggcaccagccacggcagcagcatgtactacgcgcgctggtacggcccgtactacacgtccagcggcaccgtctaccatcccaacggcacccagacccggcgcgacatgtccgccggaccgctgcgcccgatgaacgtctacgacagcaccggcacgcgcacgcaatccttcaccaacgccaccccgcacgccgcgatggtggaagaagccaccgtccgccgcagctccctcagcggcggacgctccatgggcctgtccatgcgcgccgcggccgtatcgcgcgcaccggtggtatcgcgcggcggcttcaccagccgcttcggcagctccggacgctccggcggcggctgagtgccgcctgccgatcgccatgtcgtattcacatccctgacaactgacaacgagtccaacctatggtcaatgccatgcacccggcgcttgcctacctgatctatatcgtcaccagctttgccatgctggggctgttcctgctggtctatacgcgggtgacgccgcatcgcgagttccagctgatccgcgagggcaatgttgcagcggcgttgtcgctgggcggggcggtgctggggttctcgctgacgttgtcgtcgagcattcagcacaacgctacgtttgggatgtttttgttgtgggcgtttggggcgtttgcggtgcaggtgttggcttatctggtggtggcgagggcgttggggggtgttggtgaggctatttccagcgataaccggggggttggggcggtgatgggggtgatttcgttggcggtgggggtggttaatgcggcttgtttgacttgaggtgatcttgggccgaggatcgcgaggttccattagcaaccacatgaccagaccaatgcccgatcgcccgcatcaggaagacctgaccatccgacctgccacccaagccgatgcggctgcgatttcggcggtacatgcgctttgctggcatcaagcatatggcgagctgcttcccaaagatatgcttgcgaatgtgacagcggaaagccggctgccagccaggtatcgcattctcgcggacccatcggtagcctgtttcgtcgcgaccagtgaggctgaagtcgtcggcttttccgattgcggaccatgtcgcgaagcagagcaggaatgtcggggagaggtctacgccctctacgtactggaggcgtttcatgacaagcgtgtcggcctgaggcttctgtcgtgctgcgcgtcagccttgttgaggcgaggttccagttcgatgcgcctgtggtcactcgaggaaaatgcacgggcgcgcaggttctacgaacgtgccggcggacgactgctagaccggcgcgtctcgacccggggctcagtggtactaactgaagtggaatatcactgggacctcattggcatgaagcggctcgcagcgctcaagtggcatttgttgtgtaaatgatcttgcggatcgccggcggaaaggcaaagagcgggatcacctgatcccagacacgacgtcaggacgcggcgatcggggagtagtccttacccatttgtcttggtcgaaggcctccagctcggccagcgcagcctccgcactgggggccgcatacacgggcttgtgcgccgccgccacggcgcggcgccccttgccgccgcatccggactgaggcaagtcatacagtcgccgtcatcccgtcggcccccaacgtcggcccggagcgtcaaccaacgcgatcgccgcgctcctccacagtaatccggtgcaacaggcgatcatacccatcatagccaccagtcgccgcatgattcacacatcggttatcccaaacaacaagcatcccctgcgaccaccgatggcgatacacaaactccggcctggcctggtgctcaaacagcgcacgcaggatcggcgccgcctcctcgtcgctcatgccatcgatgccgatcgtatagcccacgctgacaaacaaggctgtgcgcccggtttcgggatgcttgcgcgcaatggggtgtagctgcgttgccatcgcactgtccgaatagcggatagccatcgagcgtcccttgtccttctcaccatatgcgccctgtcgcgaatagccgcgccgcgcggaatggacgccttgcctgccgtccaccagtgatttgagttccgccggcagcgcgtcccaggcggcgtactggtcggcgaacagcgtgtcaccgcccactggcggaatgacattgccgtatagcaccgtagccgccggtggctgcgccaggaagctccagtccgagtgccaggactcggcaaagatcggcgtgcgctcgttggcatcgcgccgcacttgcgcgacatggggatggccagggatggcggtgaaatacggatcgctgccgagcgggccgatcgttgacgcgaagcgttcgatgtcctcgatggccaggtcctggtcggtgaaggcaaggaccttgtgctcaagccagtgccggcgaatctcggcgacttgcgcatcggtcagtgcctgcttcaggtccaggcccaagaccagcgcgccgcagggggcgtcctgcggcagaacttgcattgccattgcgcgtctccttgatgagcgtaagggagcgagtggggcgcaccaggcgcacagcggcgcgctcaggctgccacgccgaccgggcggtcgccggcgatggttgtgcgatgcagctcgcggtcaaagccgtcatagtcgttcatcgccagatgctgcgtgcagcggttgtcccacacggccagcgcgccgcgggtccagcggaagcggcaggtgaattcggggcgggcggcgtgggcgtagaggtattgcagcagcggcgcgctttcttcttcggtcatgccctcgaagcgcatggtgtaggtgctgttgacgtacagcgccttcctgcccgtggcgggatgcacccgcaccaccggatggaggacctcgctgttggcgcggtcatcggtacgcacgtccatcttgtgggcggggtcgccgttgttgaccacggcgcccctggcgccataggaacgcacggggctatgtaccgcgcgcaacttgtcgagcaccagctttagcccatcggaaagcgcgtcgtacgcgtgatacatgctggcccacatggtgtcgccaccgtagggcggaatcacgcgcgcatacaaggcggaccccagcggcgggatttctgcatagctcatgtccgtgtgccaggcaccgccgaagttgcgtttggtctgctctgccttgcccttcatcaccggcaggatttcagcgtggccttccagcgcgcggacgaacggcacttccagcagatcgccaaagcgggcgctgaacgccttgtgctgatccggcgtcaactgctggtcgcgaaagaagatgacctgatggttgtgcagcgccgagcggatctctgcgaacgtctcgtccggcaccggctgggacaggtctaccccactgatctccgcaccgagggcgcccgcgatgggctggacatcgatgaaacggtattgcgacatggcttgcgttctccttgcttaaaaagtgttagcgactgcgagggttactggacggtgatgtgggcgctgcgcaccagcgcgcgccacttctgcgtttccgcatcgataaagacgccgaacgcctccggcccggctccggagatgacgccgcccatctcatcgatcttcttgcggacgtcgggcatcttcagcacggcttccagctctgaatccagccgggcaacgatgggcttgggcgttgctgcgggcaccagcacgccgaaccagcctgcaatctcatagccgcgcaggccggcttccgccatggtgggcacatcgggcagcagcggcgaacgctgggctccggtgatcgccagcgcgcgcagcttgccggacttcaccagctgcagcgccgacggcatgttgtcgaacatcaccggaacatgccccgccacggtgtcgttcagccccggcgcgctgcctttgtagggaacgtgggtcatgcgcacgccggcggtgctggcaaacagctcgcccgccaggtgcagcgaggtgccggcgcccggcgttgcataggtcagcggcgtagcctggcgcttgccgtactggatcaggtccttcacggattgcaccggcagtgccgtattcacgaccagcaggttgggcaccgccatcagcatggtcaccggcgcgagatccttgcccggcttgtacggcaggtcgggatagagcgagggattgatcgcgatggggccgatattgcccatcacgatggtgtagccatcggctggctgcttggtcacgtagtcagtgccgacattgccgccggcgcctgccttgttctctaccaccacgggttgcccgagccgttcccccagcttctggccgacgatgcgcgccagcatgtcggtggatccaccgggcgggtaagggacaacccatttgatcggcttgctcggccaagcatcgctggcccaggcggcaggcccgggcatgattgcagccgcgcaggccagcgcggcactgagaatggggcgcttcatgttgtctcctgtggtggagcagcgagaatgcttgccgcccacgctttcttgatttatattgttcacttagtgaacgtacattacacatagtgaacggatgaagagtaatagatcaatcctcaggtgtctagccatcctgcaagcgttccgccagaacggccgtccgaccctggccgagctgtcacgcgcggtggacttgccccaccccacggtgctgcgattcctgctgacgctggaggaagagggctacgtggcgcgcgaggcaaaccagtggcggctcaccacgcgcgtgttcgagatcggatttgccgcgatggaaagcctgggcgtgaccgaagcggtgcaggagcacctgcagcaactggctgacgtgtattccggcacggcgaacctgggggagatcaacccggaaggcgtcatcatcgtcggacgcgcaatggcgccggccgagcggcgccggctggtggtcatgaacttgcgggtaggcagcgtgctgccgccgggcagtgccctggccatggcgcttgcgctgccggtcggcgaatggagcgagctggaatatccggaaagcaatcagatgtcgattgccgtgccgctgcctgcggtggggtccaggcagctgtcgcttgggatctctacgtcaatgggcgaggctacgcctgcgcggatcagggaggagatggtgcctgcgctgcagcgggctgcggggactgttagtcggatgattgggttggcgccggcttgaggggggcgggaatgcaggcattggaggtgatggctcgcttcaaaacggcatcgatgtcagcccctcattgaatgccttgaacttcttcaagcctgccgcgctgatcagcccttcatccccgcacgccccgccttcgccgcccgcttcaagggcaccagcgtgaccgccgcatcctcggtcctgtccgtattgaccagtacccccgccgagacaatataggccgccgcgctctcgatatccccgcgcagcgccgcgcatgccgccgcgctgtcatgcctgcgcagcgcttcgatcagattgtcgtgatgcttgaccgcgacgcgctcttccacgcggcgcgatccggagcggaggtcatggttaaggatcgggccgatgcgcaaccactgcgactcaatcatctgcaacaggatcggcatgcgcgccgccgcatacacggcaaagtgaaaggcctggttcgcggcgatgacatccgcgccgtcgggactgcgcttcgacatctcgtcggcaaaccggcggtgcagtgcctgtacctgcttcagttcctcatcggtgatgcgctccgccgcggtcgcagtggcgagtccctccagttcgatccggatcttggtgatctcctcgaactggctgacgctcatcctcggcacccgcagtgcgcggtttggcgtgagctcaagtgcctgctcggcaaccaggcgatgcaccgcttcccgcaccggcatgacgctgacgcccagtgcggcggcaatgttgcgcagggaaatctgctctcccggcatcatctggccgctgatcagcaggtctcgcaactgcgtgtagacgtcgcggctgagcgtctggcggacaaggggcgtgacaaggtcattcagggtcatgccgcgaagcatagcacatagggttattctctatatttgatctgtgatcacagttttaatcttcgtccggaaggcaggcagccgcctgtccccaagaggattggaatcatgtggaaggatgaatcgctcgccggcaaacgcgtactggtgactgctggcgcagacggaatcggcctggagatcacacgggcgtttgtggaggcgggcgcccgcgttgcggtttgcgacgtggctggcggcagccttgaacgtgtctgcgccgagttgcccggcgtggtggcagtcagggccgacgtgtcgaaggaaagcgacgtcgaggcgctgttccaggcagtggatggcgcctttggcggcctggatgtgctggtcaacaatgccggggttgccggcccgaccggcggtgtcgaaaccctgtcgctggccgactgggagcgcacgcttgccgtcaacatcaccggccagttcctgtgcgcccgcgcggcggtgccgcgcctgcggcaggggcgctcgccgtcgatcgtcaacctgtcctccgctgccgggcatctcggcatgccgggccgttccgcctactccgcatcgaaatgggccgtggtgggctttaccaaatcgctggcgcttgaactgggcgcggatggcatccgggtcaacacggtgctgcccggtgcggtcgacggcccgcgtatccgcgccgtcattgccgcaaaggccgagtcgctcggcaagccgcttgaggaagtcacgcgcaactacacgtctcaggcggcactgtgccgcatggtgacgatgcgcgacatcgccaacatggtgcgcttcctctgcagcgaccaggcggccaatgtgcacggccaggaaatggtcgtggacggcctgacccaggcgctcagctagcgcgaccagcgcattccgggggccgccggatatccgcggcccgctatccgccaaagcgcgacaacacccgaccaaggaatcaccatggccaagcgagccaaagccatcatcacctgcgccccgaccggcgccatccacacgcccagcatgtcgccccacctgccagtgagcgccgacgagatcgcaaccgccgccatcgacgcggcgcgcgcaggggccgccatcctgcacctgcacgcccgcgacccgaaggacggacacccgtcgcaggacccggagctgttccggccgttcctcgccaggatcagcgccgagaccgacgccgtgatcaatatcaccaccggcggcagcccgcacatgacggtggaggagcgcatgctgccggccacgaccttcaagccggaactggcctcgctgaacatgggctcgatgaacttcggcctgttcccgatgctcgaccgcttcaaggaattccagcacgactgggagcgcgaacacctggagaacagccgcaacctgatcttcaagaacacctaccaggacatcgagaacatcctgcgcatcggcaatgccaacggcacgcgcttcgaattcgagtgctatgacatcagccatctgtacaacctgcggcacttccttgatcgtggcctggtcagtggcccggtgttcatccaatccgtcttcggcatcctaggcggcatcggccccgatcccgaggacctgatgcacatgcaccgcaccgcccggcgcctgttcggcgatcagttccgctggtcgatcctgggcgccggccgaggccagcttccgctggcgaccatcggcgcggcaatgggcgccagcgtgcgcgttggcctggaggactcactctggatcggtccgggccagctggcggcatcgagcgccgagcaggtcacgcgcatccggaccgtgctcgaagccctgaacatcgacgtggccacgccggacgaagcccgcgacatcctggacctcaagggcgcggcaggcaccgcgttctgaacaggcggggccgccacggcccggccccgcccaaccctcgaacactgaagacatcaaccaggcagaacggctgacacgcggccccagggcgtggcgccatatccgccgatggagactacgcacatgcagaccgtacccgcctcaggcgcgccgccgctggccacgccgacagaccgcccgctgaccgcactactgttccgcaagctcatgcccttgctggtgctgtcctatgtgatcagctttctcgatcgcaccaacattgcactcgccaagacccacatcgctgtcgacctgaacatctccgccgcggcctacggcctgggcgcgggtctgttcttcctcagctatgccttgctggaaatcccgagcaacctgatcatgcatcgggtcggggcgcgcttctggatcacgcgcatcatggtgacgtggggcctgctgtccgcggcgatggcctttgtccagggcgagacctccttctacatcatgcgcgtgctgctcggcgcggccgaggcagggctgtttcccggtgtgatgctctatctcacgtactggttcggccgcgaggatcgcgcgcgggcggtaggctacttcctgctcggcgtctgcatcgccaacatcgtcagcggcccgctgggcggtgcactgctgggcatggatggcatgtggggcttcaagggctggcaatggatgttcgtgctggaaggcctgcctgcggtgttccttgccgcggtggtatggaagaaactgcccgacggccccgacagcgcgccatggctgacgccagtccaggcgcaggaagtccgcagccgactggccgcggaagccgccgacgccagcgccggcaaaggtggccactcgttcctgggcgccatgcgtgatccgcaggtctggctggcgatcttcatctacttctgccaccagatctcgatctacacggtgatcttcttcctgccgggtatcatcggcacgtacggcaagctcacgcccgtggaaatcgggctgctcaattccctgccctggatagccgccgccatcggggccgcatggctgccccgacatgccaacaccccacggcgcggccgccgcctgctctgcctggggctggtcgtgatggcaggcggcctgctgattgccgccttcgcaggcccggtgatggcgctcgtcggcttctcgctgaccgcgctgatgttcttcgtggtgcagtcgatcgtcttcctgttcccgtcatctcgcctgaagggcgtggcgctggcgggcggactggccctgatcaatacctgcgggctggtgggcggattcattggaccgtcggtgatgggcatcatcgaacaggcgaccggcagtacgcgtaacggactggtgatcatggcgggcctgttgcttgtcgcctgcgccgtggcaccgtttctgcggcaggggcaggaacgctgaagggctggaaggcagaaacgtcaccatggcagaagtggtgctggctgtactccaggggcggcgctcggcaggcaacggccggcgcccggcgcatctataacccataactacccataaccacccataagccatccaacctcgacattgcgcaacgcggcctgggtcagttcgctgatccgcagtcccgtggcatagccgaagtccagcagaaagcgcaaccgttgcgtcataccgtgacctccgtctgccgccggatcaggtcctccgcctcggctcgggtcagggcgccctcgcgcctgcgctgcggctcctgcgcccacatccgttccaggtcttcacgcgacggtttggcatccgggccgctcgggacaccgatatagtcgtcggcgtagggacgggcatacgggtcgttgggtgtgggcttgcacgctgcctcgatctcgggcggccacaccgggtcgccgcacgtggccagtacgagccaacgggcgaatgcatcgagcagggcgaaaggcgagaatatgaagtcgatcatggcccaaaaagccccggagaatttcccgccccggcaaatcttgtacccctcccagaacgtctcccgcggcggccagaaacgatagggctcaggcagattggcggggccgtcctgcatgtaacgccggtagtattcccattgcgcgtagatctcttccagcgtcagcgcgaactggccgagcacgaaggcacgtaccacgttgccctccgcgtcgagctggtaatggcggatgtcgtacatgtcataggcgcgcgacagcccacccatgcgccggtgaccaacgcagaagaactcgtcctcgctccatgggacctcccagatgccgccggggtccttggtgcggatggcgtagatgcggcgcgtcttgcggttcagccggatcgggcggcgtttcagcgtgaacatgttccgccgcatcggatcgaaggccaacaagccaaagaagccagttccaatgattccaacggtcgtgccgagaattacgcctgcccagttgcctttacgagccatcacctctgcagtttctcggaatggggcggaagcaaagaatactgttcccagcaacataaaaatcgtcgcaaacgagcagattatccagagcatccccacgttctgtatccgcatttgcgactcatcggtgatctccaggcaggtcgaatcgatgcgatagacgttgccgtactccacgacttgctcactgacggggcggcggatggacagccggtgctccaactcccacttccccagtggcttgcctgtctgcctaaaataaaaaggcgtgcgctcatctttggtcgggaatttcatcagcgccctcacttggtgtccttgagacccagttgcacgaactcaaacgattccgccgctgctgtagtgctcgctggcgggagccttgctgaagcggcaacgcttgatccacttgagggtggcgggatcatccagaagcaggatgccaacattcacagcgaacagcacgacgaggaacggccaacttggtacgccgacgaggaaggccaaaaattcttccgaagcaagaggaaggattgcagtggcaagtccagatccagccgacgtaaagtacagacctgaaacaaaatagttgcccttccggccttcatcggctccgtgataagcgtcccatccgactcccacaacggccccggcgaaaccgatccagcggcccttaaccgccaatttcttccccgtttctgcccactccgctttggatggcgaacgcatgatgcgctgaaccagcgggtgcgtcggtgccttctccaatgcgacacccgcttgctctgcgacggtgccggccatggccaccaagccgcccaccagcttggtgcctttctccacctcatcgaactcgccagccgcgcggaaggattgggtggcgtgatagagcgccagcccttgcaggatgcaggcaaccgcaccgacgttcacaaagcgagaacccaagactgccttaacttgccgcacgccgggtacgtcattttccgtgcgcagcttgagcacgctcagttcggcattgctccccagatcctcggtcctgaaccagaccagcctcgcgctctgcgcgagcttgctgctggcccgccgcgcccaggctgcggcttcctcgcggcgctgggtccggcctaactgcttgtagagtgctggattgacggcctccaggtcgctcagcaccgtggcacggatctgcatgacgctcgcggtacgggaaaccaaccgtacgccgctggacaggctcatgccatacaaggccaaccgggcggacgccaaccccaccttgttggccagggcaggaataacctcatcggcaagtatccaggtcaggcgcggcaccagactcatcttcgccagcgcttcgggcagtgtgaggccctttgccgtgacgtccatgttatcgatgccgcttttcaggatgccgaagatcgccccgtatccctggtcggtcgggtccgccacggtgtcgatgatgggcttgtgatccagcatcagcgcccgcgcaagcagattatcgtggcgtaccggattcgcatcgtcgaaccagcgcttgattacgcgacggcactccacggtatccagcgcattttccaggcatcgggtcagcgactcgttgtagacatagccatgcggcagttcgagcttgtcatggcggtactgcatgtaggcggcaagctgggggctcacgagccattgcgcgagcgacgccgcaatcggtgcgagcacattctcgttgagcatcttgaggcgcggcgccagattctggtggcgcttgcccggcgtcagttcatcttcgtagggcttccatgcggcgtcgctggcggccttcaatctctcaaggcgcgtggcttcccgcgcggcgtcttcgcgcttccagcgctcggcggtcgctttgccattgaacagggctgacatgagttcgtaagctggaaatccttccggcgtggtcgccgtgcgctccgcctcagcgagggccgcctcggcctccttcgtgtgctgcgcttccgcgttggctcgaatgttcttttcgagcgtattcaggaacagatcggttgccttatcccagatgacactgttgttggccttcggatgcagcttcggattggtaagtttgcccagatcctctgcaatgccaagcggatcattgaaagccagcagcatggcatcgccaggcgagacccgctccatggcttcagacaggattgcgcccgctgggctgccgatcaggtccaggtggtcgtccgctttgacgcgcggcggcgcggacagatacttgaacgcctcgtcctgatccttgggcggcatggcaaacgacgcaacctgtttgccaagctccgtcatccgtgccgcatgcggggcattgtggccacccatccatgccttcacgtccagagactgcatgtgcttcttgcgcaggtccggctggttcttgttgtcattcagttgcgcctgggtccactggacatgcgaataggcataccagacggtcgtcgcgtccttcaggttgggaatcgtgaagtacatcgacgtatagccgtgaccgattcccacgctgcaaaagaattcggtcggcgtcttgggcggcgccgggcgctcgggaatgattttccacaggtgtccgccattcagcacgagatagcaatcccagtgttgcaaggcttcgtggaacacgtacagaaagcccggacgcatggcccgcagcgtgtactgcgcaccgccgccaagctgggcgggtgcgtccacgatcttgaagttcccggccagggccggcgccccttgcttgccctccgggccgaccaccgcatagcgtaccggcagcacggcgagaccgggcggatggtcgcaaaacgagcagcccttgacggacggtgtgaagcggtcaacagcagacgtggcgttatccatagtgtgaggcgcttgcggttttcctggcggtttccgccatgatcttcatgagttgccaatcgtgggaggacaattgggccagcgcctggcgcagggtcatctcgccgctggcgacggcgggccacaatgcctgcaacttcgtgtggttctcgaagggctggccaaacgcggcggcataggtggcgtagtgcttgcggtcaaggtcactcgacacgcgtagttcgtcggcggcgaaacgcagcagccggtccacgttgggcgcctgcgcaattgacggcttggctttgcctgccatgcggaccaggacctgctcgatatcagtggtctgcttgaccgtggcccattggctcgcgtcgggccaccagggccggggatcggcactgtctggctgtgcctgcgacggcggccggtccagtgcgtaccagtcgcccgtccaggcaaagccccagacctcgcacggcccgaacaacgcatgtagttgctcaggccacagtagccaggccatatgcacgaaaacgcggggatcgtggaagcgccacagggcatgcccttcgccgtggtcggtgcccgtcaggcatgccgccagatggctggcgacgtccgtgacgggcgccggtccttgcagccatgctgcagacgacaggcggatcgccgcattgcgcggcttgccaggcacgcagcagcaacgcgtgccgcgcctccgctggggtctccgccaggtctagtagtgacggcatgaggtgcgcatccttttccgtggacttcatcaacttggcgtagcgcgcgttgccatctgttctcacaaatgagaaattcttatcctttgatgtgaaggcatcgatagatgaataaccgcgtgccttcatttgacgaaccatgacgcttgccagcgccgccatttcttcatattggtctcgcgttgaggattcaccataggcaatggctgccagcaagcgttcctcggaagtgagcttgggagaatccgtcatgctcttgcctcgcgcaagaccggaggcgtgatggagggttgctcaactgtttcacctcaaacaactgaatggagtccgattccgccccgcgtgcaacgtgcatatgctgacgctaagggcacccgtggccgcgatggttcgcgttgttgggttcagatctgcccccatcgctaagatcgcctttaccaacgccaagatgtacccaaccccagttagtgcatccataggccgacccttaaagttggtccttcttttgcactcagaggtccttagaatttgtgtcgcgtattgctgaatggcctcgcgcgaaggggggtcataatgacctctggaacggttcaaggatgaccgtagcgcagccggaatgcccgcaaatgtcggcctggaggggtgctgggacgttggcgcttgcactgtgcctacctggtacacagtcttgctctgcctctacattctgggaccatcgattgtgttcgccgtggtgggctggagggcttgcgacgctacgccgaggcgcctagtccaactgctgggcttactcgttgtgggcacggcatcgctctacctggtgacatatgcggtgaggtagtgtccaatgccgctcgctgtcgaacctttctcacactgaatcgagccaccacaatgcagggaatgaaaacgaaggcgttctggcgccgcatgggccttgcgctatgcggcgccctgcttctctccgacgccatcgccttgatgaccatgggcctgttcaacttcggcatcgtcctgccaggctgcatcggcgcgtcattcctgctccttgcatggcagtggccccgcgtagcccactggcgagccgccagccacaggcgccagcaactatggcaagcagcatggatcgcgttcgcactgtggctggcgaccgtggccatttttttctacaacatccaccgcagcaccgaagccgccatcccaggaagctcgcccgtgaaagccatcgtcatcctcggttccggcacgccgaattgcgtcgcttcgccaacgctggttgcgcggctagatcagggcttgaagcaggctcagcgttggccgcaggcgaaggtcgcggtcagtggcgggcaggatttcgggctgcgctgccgggaagcggacatcatggctgagtatctgatcgaccgtggggtcgcagcagacagggtggtccgggaagggcgtagtaccagcacggaggagaacctgctgttcagccggcgcttgctagaagagcagggcatcgccgccaccgatcccattgtggtggtgaccagcgatttccatgtacggcgggcggtgcggattgcccggaaggcaggattcggggaggtcgccggagtcggggctgggacgccgctctaccttcggtataacgcctggctccgtgagtacttcgcggcgattagtggatgggtgttgatggagtattgactcctgcgcagcccgccctcaagacaatgtggcgagcaacttgttgaagttgcgttttgcgcgatagttctcgcgaatctcctccacctcgcggctgaattccgctcgctccctcagctttgtccgcagactgccgatagcgcgcgggatttcaagtgcttcgtcatagcgcgcgttgcgtgcaccgctatcgacagcgactccaacagcggcgccgaaatgtctgtggcgaaaataccttagcccccttttgggggacgtcaatcaggccggaatggcacatagtcgcccacgtgcccactagttgagcggggcatgatcacgacgtgccgctttcggcgcacgccggcccggctccgcgcggtgagcacgggactagagtgcgtgcagcttgtcgggttcgctgacctcgactagcctctatcgatgtcgattcttcgctgcgctgcgatacccatttgatgccagaacgctcgaccacccgatatggcaaggcgctgcagcgcctgcaccagttcttctccccgttgaacctggcggcggcggcgtggctgattgcaacatgggcgttcgcggcgtttcagctcgtgagcgagcgggaccgcctgctgcacgacgccgcggagcgtacccaggcgcaggcccaggcgttcggcgcgtactcgaaatccagcatcctgcggctgtccgagttcctcctcgacctgcgggccagctggctggtcggccagccgggattcatcgacatggtgcgcgagcggcagaacctggtggtggacctgtcgttccaggtgtcggtgatcgacaagcatggcctgctcatctactcgtccatcgccccgcccacgcccggccagaaggtcgacctgagcgagcgcgagcatttccgggtccatcagaacgcgggcgggcgcgacatgctgttcatcagcgacccggtgaagggcaaggtctcgcgcaaatggtcgatccagttcacgcgccccatcctgcgcgcgggcagcttcgacggggtcatcgtggtctcggtcagtccggagcagttcgccagctttgcgcagtcgttcacaaaccgcgatggcgaagtggcgtcggtcgtcaagacttccggccaggtcattgcgcgcgtgccggccatggagggcacgctggccagggcggtcagcaacagaccgtacctcgccagcgggtcgccccagtctggtagttatcgggcggtgtcgggctccgaaggcgtggagcgggtcttcggctattaccgtttgccggaattcgggctcaatttcgtggtgggggagtccgtcggcctggtgctggcaccctacgaggtctatcgccgcgttgccctggccggtgccatggcttccacgctgctgcttggcctgttgtactacagcctgcgccgctccatgggggagcgacggcgccatatggaggagatgaagctggcttcgctggtctattcatccagcagcgaggccatggtggtgacgtcgctcgatggcaccatcatcgacgtcaatccggcctttgccgccgccactggctatacagccaaggaggtcaagggccgcccgggccatatcgtcagcggggcaggcaatgcggcagggctggtcgagcgcctgcggaccaccgtggcatccaagggcagatggagcggcgaattctcgatccgccgcaaggacggcagcgagtttcccgcctacctgaccgtggatacctacctggcccacgcgtatggcgagcgccgccgcgttgcgctgatccatgacatgaccgagaaacgccaggcggaggaagtcatccggcaccaggcgaatttcgatgcgctcacggatctgcccaaccgccgcctgttcttcgaccggctgaggcaggagatcgagcgttcgcgcggcacacaggatgtgctggcgctgctgttcatcgacctggatcgcttcaaggaggtgaacgataccctcggccacgaccagggcgacctgttgctgctggaggcggcgcggcgcattgcggcatcggtgcgcgcgtcggataccgtggcgcggctggccggcgacgagttcaccgtgatcctgcccgcggtgggcgatgccggcgttgccgggggcattgcccaggccatcctggagcggattgccgcgccttaccgcctggccggcgagctggtggtggtgtcggccagcatcggcgtggcgacctggcccaaggacgccgacaacgccgaggacctgctggtgtgcgccgaccaggcgatgtttgccgccaaggaggagggccgcaatcgctggaaggtcttcacccaggccctgctgcaggcggagagggagcgcctgcgcatcacgcaggacctgcgcacggcgctggcgtccgggcagttcgcgctgcactaccagcccattgtcgatctgcgcacgggcaaggtctgcaaggccgaggccctgatccgctgggaccatccggtgcgcgggccgatccacccggccgatttcattgccgttgcggaggaatccggcctcatcatcgacatcggccgctgggtgctgaccgaagcgctggaccagcttgcgcgctggcaggtgctgctgggcaagggcttccagatctcagtcaacaaatcccccgtggagttcagcgcgcctgcgatcgggcccgagtcctggtccagcatgatcgagcgcaggaacgtgccggtgggcagccttgtcatcgagatcaccgaaggctcgctgatggagcagaacgccgatgtcatggaccagctatcccgcttccaggcggccggcatcgagatcgcgctcgacgacttcggcaccggctactcgtccttgtcgtacctgcggcgcctggacatcgactacattaagatcgaccagtccttcatccgctcgctgacgcggggcccggacaacgtcgccttgtgtcacgccatcatcagcatggcgcatgcactgcgcattcgggtgattgcggagggtgtggagacggagtcgcagcgggacatactggtggctgctggttgcgattacgggcaagggcacttcttttgtccgccggtggaggctagtgcgtttgaagcgtttgtgagcgctgtgacttgaggcgaggggcgtttttcggtgccccggactcccttaccaattgcaacaatggagtctcgccaatttggcggactccgttccgccgtcagcgtgtagtaatgggcggatcgaatgaatagccttcggctgtccaaccgatcaggctgccacacctgacccggaagttcggtatcgatttcgcgccgacctgaaacaaccggcattcggtcctaggctcaacatagccaacgacctttgccgcagggtctagcatgccttcccactcctggtatagcgcaacacgtttcgcagcgacccggccttcgaaatccaggcgatagccgccgatcaggctgaatagggtaatggcaaccgctgcggaacctagccacaaaacgtaggacctgttcttatcagtttctccgacgcgccacattcatggtccctcttgtaggtagttcctcaatcacgcgcttttcggatcacgacaacctgaacgcaatccacccgtgcccaagtcctagaccaagcgcaaatagcatgatgccgccgacggcgtcaacagaattgccaccgcatagaggattccgtccagtgccaggagcatggccacaaggtcgacactgcacacgagccgcgacttaacgctcatcgcaatccctctgatgccagcccaggccaatatggtgatatgggaaagcccttcagctataccggaacgaaaagttgctgggcatgggaattgtctaggggatacgcggaatcttcggtaagcggcatgtgcctgactctcggcagcgcattcctgcaggatccaccctgtctgataccgttgcccgatgctcctgactgcatcgacggcccggcggaaggccccttgccgtcgtgcagatcctgctacgacgggctccgaccgcagaggcgattgacaccggcaggctctgcacagcgaccggcttgcccgccggttcgcgctagcgaatgtgaaaattttgcaatatttgcgaatcttaggacgtagctcaaatttcttctgagtatctttcgctagatatggaaggcaatcattggatggataacctgaggaggttccgaagtcatgatgcctgacactcgctacgcactacgaaacggcgacaaaaccagtacagacggcgtgctcaacggcactgctcgcaactctcttgatcatggcgtggccttggccgtagaaggtgactatgcgacctgcccggcatgcaaagctggcggtcctgtgatgaacgactgttatccggctttcgatataggcggcaagcaagtgctggtgagtggcgcccgagtgtattgtaaatgccagacaaagccagttgtcctgccatcccagatcagcttcacaattgaagtaaataaatctggcacggcctacctttccgctggctcgaacggtgattcatctttggagcccctctcgaactctcaggatattgttgagcagtactttgaaataactgacgaggatgggcagcctgtggagggttatcgctatgacttgtttgcaaatggcgagcagttagccagaaacagaagaatgatcagcgggcgaaccatctctttcgaaggtagtcatgacattcacattgttatgtggctcgacaagacagggcaggagcgagcatgacagagaagcttgattccgaaacgcgcttgcttgctgcgatggcctatggcgagtcgtcgacggccgatgtatttgaggaaatggccgccttggccaacgtgatggttcggcaaagtagagcaagaggatatagcacgatcgccgcattcaccgctaaggaggcatctttctcctacgttgtcgccgatggaaacaagcgatacgcgaagcttatgacggccaaggacgaggagatagagaactctccgtcaatgtctgacgcagtaaaggcggcaaaaaatgcattgaatggaggggaggattattcgaatggcgcatacttctgggatggcgcggacatcaggtccaactacaagaaccatttcaaggtggcaaagggaataaggttcacggatccatcccacaacatctacgggatcaaggaatccacaaagttagtaaagaagataaagaccacaaagatcaaagtgaatggaaaaatcgagacaaggaaggaagagctttggcgatacgatcacatttatcagtcgacggccgcttatggcggcaccatcttttggaaacaaaacccggattacataagatatacgcacgcgaaggagtacctatgaagcggatattggtgttgtttttcggcctggcgctagtcccccccgccttcgcacaagtgccatcacaggtttttgatagttgcgtattgatggaaagctacaaggctgcgaaataccaagagcttggtggtgacgctacggtcatcgacgacgagatacctggatattcggtcctgagctatcagcataaaggaatcgcctatgggtatgcatcaagcgccagcagccaaccggatttcctcgtggttggttcacaaagggtgtcaatcctgaaagcccagcgagtagggaaggcaaatccagagagaatcgatccagctcaggcggtctacggaatcgtgcgctacaaagcgcgagcctactattgcgtggcatccaactttgaggggttggggcgaagcggctcgtttcaaaacatacgagctgcctatatcgctccgctcaatgcatccagcaaggcgctgaagatgagcgggctctactattccgtgcgggatatccgcaatatcccgagatagccggcctacatatgcgttgcggcatcgaggacacatctggacccagcgccgcgaccgcaagatgggaccgtgtcgcagatcgagcaaccggtgcgcatgtcgcgtgagttcggccgcgacgtagccaacgacgaaggagcgcgcagcgcgcgaaatctaaaaaatcggcacggtccacggcgccgatgaaacgctggccaagaacgggttcgcaccgaaccgcaagccggggcaggtcggatccgaggcacggcagacgcgcataagcggcgtcgatctggacgagaggacctatatactttcgctatggacgttctaatccaaatggcgtgccccttagttaccgacgcataagcgtgtaggatctcggtatttgcggaggccgccatttccgcgctccacgcggcggctgagtttctaatgctgggataaggaaatgcgaagattagtctggcatgaattccccatgcctccgtttatcaaggttcggagatcgtcgcgtgccgctgttatcgaggtgcaccaactatgagtagctatgagtgtgactcctccacgcgacaccctggctatgcatagccaaagtacctcctccaacgaatttgctccgctggaaagcgatattctggagcagatgagcgaacagggtggggcaacagtacccgatgcgatagaaatgggcgctctcgccccctcatcggggctgatcgacctatcccgccagcagcgcaacctgttgctgctgcgccccctctttcagcttgagcttaacaagcagcgcattggtgaagatggcaccctctttgagggaatcgacacccactacctcctgctaagctcgctcgaccgcatgatggagggaacgacagtctcaacgggttgtaccagcgacgaagtcctcactcacatagcagacaccgtcatggcaatgaagccttcgctatcagcggttcaatcgggcaaggtcgcggacaccgtgctcgcagcgctggacaataaggccaacgggtacaaagaattctcattcgagtacttccatgcaacgcataaatccacgcgcagcattcgctttcggttagtcgcctacgagcctgacattgaagatgtctaccgctataagccaaccgcagaaggatacctcgtctaccttggcatgcttgacctctcgccggaggacgcgcaggaactaatggagaagatgctggagttacttgtgcagcgcggccgattcgacgctgcgttggaaattgcccgacgcgcccgcacgctgtcaatcgagtatcgccagctcatccgcgacaggttgtatcaagcttaccgcgcgccaggcacagtcaactggaagcgcgatatcagcgctggtttggatcgggcgcgagaacatgtgcgacagcgccaggcagaggaccagcggatggaagagtctgttctgctggccctgcgacaggccgaggaacccaaggcgcgcgcgaacctggcgctcctgcttaagacgctgcaaggtgccagcatgctgcgttcgcaacttgtgggagatattagccgcgccaatgaccggttcctggaggcacagcgtacgttgtttcgggcccggcgcgccaccggactgcctgacctggagacacggctcttaccgcagttcattgaattgcctgtcaatattctggccgagcaggctgaaaacgcactcagtgcgatgtattcgccggcgctgccacgtgtgtatgaccttaattcgctgttctcgctgctgctcgagcagcgcgtcgaagacggcgacccaggggaagacgacggtgagatcacgccattcgtaccaccccctcttcagttcgatgaagccgtcatccgacaggtgacggactggttgaccgagagattctcgctggggcagtcctggcggttagatgaactgctggatcaagccgaggacatggggttcgatcgcactattcgacgctgtctagtattgatgctgtttcgggcgtactcccactcggagacagaattcaagaacatgcgggcggacgcactggacgagttcattgccgatgtggcacgcggaaccaatctgcgctttactcccaaagagaggcactcgtgagcgatatccaaatcggcgtgcgccaagccgctcgcctcgtctataaggcgctgcacacaacactgtcgccggtcaacgatcaggaataccgccagttgcttgcgcagtatcgggccaaccctgcctttgccgcgcaggtacaagacgtggctacgggcatggagctcatcatcctggacgtcagcgagcgcggactcataatcgtacccgcctcgcgcgaaagccgctttgccatccgaatgaccgacattcgcaccggactggatgccgcacagaaggcaagcctgctgctggcgcacgtggccatcgctgcggtcttttttccgaccaccgatggtctggacgacgataactacactcccccgccggcgcttgtgtcaacctgccgagacacgttgcacgccttggctcggcgcctcagggagtcgtccaacccgccggcagatatcccgcctgagcttgcaccaggttgggagtcggtatcagccatgcctctggtgctgccggcgggccagcgtgcctcggtcaactccctggtgggtatcgtcaagctcgcgctgggccatatgcaaacacatggcctggtacgtctggacagagaagccgatgacgatgcatcggtgacctataccgctacgcatcgcctgcgtgtgcagttgcgcgagatcgcgttgcgccgcctcttcgacatcgcccaggaagccgcacgcatgccggcgacgaccacggagacatagtatgcagaaaatatcgcgtatctatctgggaaactgcggctacctgatggcctggtatgacgggttgttgttcgacctgacggatccggaaacgcaccaaccgaccgacaccatcatcaacctcgagaacggaggcgggaagacgtcgctgctcagcctgatcttctcgtgctttgacacgggccaggaccgctttctcaagcatctgcaaagcaaaaacaatcatttctcgcagtacttttcgcaagacggcctgcccggcttcatcctggtggagtgggagatgccctcgcgcacggctggcggtgagccgtaccgactggtcgtgggtcaggtggtgtccatcaaggcgggcaacgacgtgccggagagcgaccggatgttcttcagctttgaagcaacaagcggcttgatgcttgaaatgattcccgcgccgaagctcggcaccgccccggtgacatcactggcggaattctcgcgctgggtacacgaagaacagaggaagcaccccgacgtctatgtcacccgcaaacaagccgattggcagcgccacctgcgtgaagagcgtctcatcgacctggaaatgctgcagatgcaggtcaatttctccgtgcaagagggcggtttcgataccggcttcctgaacttttccagcgaggcggcctttctgcagaagttctttcatctgacgctggacgcacaaagggccgccgccgtgcgcgacgccgtcgcagcagcctgcgacaagttacgtcgcaagcctcactatcaggccaagcttacggagctaacgaagttccgtgccgtgcttcgatcctttgaggagacagcgcacgcctatcgactatccctggccgaccagatgagtgtgctggtcaacggcgcgcgattggcgttggcactacacgaacgggcgaacacgcggcggagcaagcaacaggccgagctaactttcgaacgcgaccagcgggccgtggcggcgaccgccgcgtccgacgtgcttggttacagcagccaagccgccagcatggccagcctgattcacgtgcgcgccgtgcgcgccgccctggagcgcaccaagcaagccgcgttgagcctgacagacctgcaaaacgatatcaagtatgtgagggctgcacgggtactggcggaagtggacgccgccgataagcgcttgcagacacttgaggctcaggccgacctcgccaaggaaggcttgcagccgtttcgcgaccagctggaaacggaaggcgcgctgcttcgcaccgctctgttcaagcacgaacaggccctgcgcgagacgcagcgcaaaattgagaaggagtccatagaccgcaacgacacagtgaccgggcaccggacggcacttgccgaagacgaaaagcgtcggcgcaccgcagtcaacgaacaagccaagcttaccgagctggaaaaggcctgggagcgcgagcacactcgcatggtcacctcggggctcctgtccgacgctggcgaagtgactcaagtagctgtggcgcgctggggcgagaccgagcagcagatgcggcgagaggaagcagcccacaagattgcgcaaagccagcatgaacagcaacagggccactggagcagcgaggaagtgcgcctgggcagcgaagcaggtcgattcgaaggcgagattcagtccaccgcagacttcatcggcgagggtaccgccgagcgcgagcggctgtcacaactaccggcgatcctgctagctgtcgaatccgacacagcgtctccagactcccctgcattgccgtcggtgctcgaacgcgtagcggcggcgtccgcctcggaaatctccctaagcgatgtgcgcctggccgaattgcacgcgacgatgcaagccatccacgaaacaggtgtggctggtagcagtccagatgttgcgcgtgtcgtagcgcgactacgtgaggccggcgtgcgctcggcccgccccttcaacgaataccttgctgacgcattaccggacgcggagcgcgctcgtggcttggtgctgagcgacccggctcgtttcctgggggtttccgttgcacaaagtgaaatggaaaaagcccgtggcatcgaatggcatggccagaagctgacccgtccggtggtggtttccccccttgctctcgaatcagcagctgccgcccccactcgcctggtggtacctgcagcaagcgacgctgcatacaaccgggccgcggccgagacattggccggcaccctgtcggaaaccatccgcctcgaagaaaatcgtcgcgccggatattatcagcgccagactgacgcactggccgcgatgcaggcactccaaacctatgtgcttcgctttggtgagggcaaactggcagcggcgaacctccggcgcaatgagcttcagagtcagctgcgctccactttggagcgcaaggaaaaggctcgcgagaaggcggccgcggaagcggcagaagcaaagataagcaacgaggccgcagtcaaatgcgaccgcctggccctcgaagcatgctcccatcttcaggtacttcaacgcttcatggcagagtatgaggccaaccgcgaggagcggctcctccgtctcgatgagctcgaagtcatactggaagatctcgaggtccgacgcctggcgaccgaggatgaaatccagcgtcttgaagacattacgcgtgaacagagcaaagtcgccatcaaggccgagaacagcgccgacaacctggccggcgagcgttccagaattgagttctacgacaagacactggccgccgatgagcatttgaaggccaatccccgagacctggagatgctgcgtgggacgtactccgatgcgctgacggtttacaaggcgaaggcacaggatcagctgggtgtgcttgaagtgcagatgcaggaagcacgcaggcgccgcgacgagaaaaagcaggaatacacccgcgactaccccggcgtcacgcgtactcatgtagcgccgttcgagggacaggaccactgtgccatgctggttggtctggaagccaaacgtacgctcgtcaacaaggaacacctggacgccgtttcagccaagggcgcggccgagcacgcatcagaagactggcacaagaataatcgcgatgtaccgccggccactcccgacatcgaggcgctggatgctgctgccctcgatgcccgaaaggacgaggcagtgcgcatgagtgaagaggccggcgcgcgccaaaagaacgcatcggacgtggcggaccgggcgcgcggcaccgccatgcgcctcggagaagccgctggccaggacgaccgcctggcggaattgctcaagagcacgatgaagctggaggccacgccgaaccccgaactgcttgcactggagatcgccagcctgacgggacagccaccagtgctgctcgaacagcttggcgagttagtgctcgaggaggacgcgagcgaccaagtcacacgcgccgtcaagaatcacggcgctaaatcgggcctatgcgaccgggctcgcgataatgcgcgtacggttttcgatgcggtcaagctggccgccggcgaccccgagctccagaaagtcgagccggagcttgcgattgccatgctggctaacgagttcacagcggcttgcagcgatgccgcccggctgttggaaggtctcgaggatcgcattcataccacccaggacaacctggacaagatgcaggctgacttcgatgcctgcgtcgaggaaatgctggcgctgtctcgcattgccctggggttgctgaactcggccattgacaagcgtgtgcccgccaccgcgccgtatgtcgcaggcaaggcagtcctgaagatgcgcgcgaacttcgcggccatcaacgtcgagagccgacgacaggcgctcacgcattacctggacagtctgattcaggctaacgtgcctccgggcaagggctcggacttagtggctgaggccgtgcttcgaatgtacggcggccgcccgctgggcctacaggtgctacgcatggttatcgacgaaagccaacagtacgtaccggtggagaagatttccaactctggtggcgaaggtgtggtgatggcgttgtttctctacgtagtcatcacccagctacgcgcggagacccaagccaagctgcacaagcttgccggcggcccgcttatcctggacaacccgttcgccaaggccacctcgccgaccatgtggaaggcgcagcgtctgctcgcgcaatccatgggggtgcagttggtgtttgccactgccatccaggactacaatgccctggcggaattctccgccttcgtccggctacgacgcgctgggcagaacagcaagacggggcgctggcatttggagtctgtccgctaccgcctcaatgaggagatggccaatccagagctggcggcgcctagtacgattgaggcagcctgatgccggcgcaatttttcgccagactgaaggcatctccacgcaagagggtggagcttgtgcagctcaagcagttgtacttcgagctgtatccggagattcagaaccaccccgaacgtagccgcatgttgctgcaggcccttcaggcgctggccgcaaccggcgccataatgctgccagctcgcgccagttgggagaaagtcggccagccggcgttgccgatgtggatcaaactcgttcgcacgcacaatgaggcgccgaaggaggatttctccaaaattccctgggtgccagagctgggcttctggcctgagctaacgagcgcccaactcgccgcggcaaagtgcattaacgagttcctgcttcaacgccgcggaaacctccagcgaatccccatcaaggaacgttcgcttgagatctttggagacgagaagcggctcgacgctatgaggcagggcaacacactgttctcaggccgattgtcgcttgatacgctaggtgcgttcaccgtgcctctaccgcttccgtaccgaccggcacccgtatcgggcaaaccgctgctcgtcgtcgaaaaccacaacagctactggagcttcggtgagtggaatcagcgagccctacgatattcagcggtcgtctacggtgccggggaggcatttcgcagcacgggagcagccctaagacaggttctacatgaagtgaagggcaccgatgtcctgtatctaggagacctggatcctaaaggcatcggcattccgcttgactttaaccgctcgtcggcgagtgatgagcccaaggttgcgccagcaatggagtggtatgagtggctgttgtcgcatgggtttcggcgaaagaaggctgtttgcacaaacgctcacccgcaatccgccattgattggctcggagaaaccttaggcgaggaactcgcggagctatggcggggagagtgctggattccacaggaggctttgggtttcgagcagctaagcgctctgtgagcgggatcgcaaaaggaagcgcatgcttggcggcgaccattgcgcgcgatagtattgccttcgccatttctggcaagtccagacataacgaatgaaaccaggcgcccggcccggcgccgggatggtcgaccgccattttgggcggaaaggtctgcgtgatcgaacaagtcgtcatcgtcggcttcggctgcttggggcgtttagtgcgcatgaaacgccgctccaccttcaatataacgcctggctccgtgagtacttcgccgcgatcagtggatgggcgttgagggagtattgaggcttctgcgtccgttatgtcgtgccgatccagtggctgggcggccagccggggaccaccgccaccggctatacagccgaggagatccgtggccgcccgggctatagcgtcagcggcgcaagcaatgcggcggggctggtcgaccgcctgcgggcgtggccgccatgggcagctgaagcgccaggcggaggaagtcatccggcaccaggcgaatttcgatgcgctcacggagctgcccaaccatcgggtaccgtggcgcggctggccggcgacgagttcaccgtgatcctgcccgcggtgggcgatgccggcgttgccgggggcattgccgaggcgatcctggagcggattgccgcgccctaccgcctggccggcgagctggtggtggtgtcggccagcatcggcgtggcgacctggcctaaggacgccgacaacgccgaggacctgctggtgtgcgccgaccaggcgatgtttgccgccaaggaggagggccgcaatcgctggaaggtcttcacccaggcgctgctgcaggcggagagggagcgcctgcgcatcacgcaggacctgcgcacggcgctggcgtccgggcagttcgcgctgcactaccagcctattgtcaatctgcgcacgggcaaggtctgcaaggccgaggccctgatccgctgggaccatccggtgcgcgggccgatccacccggccgatttcattgccgttgcggaggaatccggcctcatcatcgacatcggccgctgggtactgaccgaagcgctggaccagcttgcgcgctggcaggtgctgctgggcaagggcttccagatctcggtcaacaaatcccccgtggagttctgcgcgcctgcgagcgggcccgagtcctggtccagcatgatcgagcgcaggaacgtgccggtgggcagcctcgtcatcgagatcaccgaaggctcgctgatggagcagaacgccgatgtcatggaccagctatcccgcttccaggcggccggcatcgagatcgcgctcgacgacttcggcaccggctactcgtccttgtcgtacctgcggcgtctggacattgactacattaagatcgaccagtccttcatccgctcgctgacgcggggcccggacgacgtcgccttgtgccacgccatcatcagcatggcgcatgcactgcgcatccgcgtgattgccgagggcatcgagaccgagtcgcagcgcgacatcctgctggctgccggctgcgactacgggcaaggccacttcttctgtccgccggttgaggccagcgcgttcgaggcctacgtgagcgccgtgacttgattgccaccgcaccaggatgcgaacggcgcgagaccagttggctcgcgccgtttgtttttcagcgctgctcatccgttgggcgggtaagcaggctctccctcgtcagaccagtgcctgcaggcggtcggcggtgtcgaccagctgttgcttgagaggcaaaagcagggcgtggaggccgatgccttgggggatggtgtcgctctgtagctccagcaaggtcaggaaggactgaaggccggcgctgacgcgcaggatgtcgtcagtggcttcgaggatgtggtcctcgagggtgatggctgtgctgggcgggggtggagcggctttggcttggcggcgggcctgggcgcggtcgattttggccaggttttcggctagttgggcttgcttttgggctagggtgggctcttggggagccggggtggtggactgcatcatgacctccggtacgtagaagatggaggctcgtcgtccgctgtcaatcgggtgggcgagcacgaagcagggttgacagaccggcacgtaccaccggcgagcccgaaggctcccccgccgcggcccgccccttacggggcgtacgtaggcgaaagacgagaggataccgcttcgctgctcgtccggtgtacgtggtcaggctgtcaaacctggtcgaccattgctgtggtgacactgccagtttccaacggcagtccgcacggaacaatgcagcgaactctcaaagcggccttccacccgtcatgtgtaaagcccaagtacggtccttcacatgcttgccaggacgcctcgagctcgccgagtttgacgcggattctgacaagagagtctgccgcagggaaatgatgattcctcgacagcagggggaaatttccgattctgccatcggatttcgctatatccttaagctttctacgatgtcgaaagaaagccgatgcaatccctgtctgtggtcatggagaactatctggcaactaagtccgctcttagcggtaaagctcgaaacgctaatacgccggatcagataagtatcagcaagacgctacctcagttcttcattgatatattggagagattggagcggcgtggagctttcaaggtcgaaggttcctatggtcaagggaatatcgccggcgttccttggattggcgtattcaacctcgagatcacaacatcagcacaaaacgggtactacatcgtccttctcttttcagaggacatgaagtcgtgttacctgagcctcaatcaaggggttacaactctcaagaatgcctatggggtagaggtggcacttcacaagcttaggggggcagccgagctagccttagaggcctttgtgccggccgctggcacggttaaaggaccaatcgacctaaaggccagcagggctttgggtaaaggctacgagcgaggtgcaattgagagctttcgatacgatttctccgcactgccaacgcccgacagcctagaattagacttcagatcactgctggggcactacgatacgctggcgaataaggtcggtccgagtctgcaggcattggtgccagtcaatgaaacccagtttcaaaaagcagtgcttgaaaaagcaacagcgaccacaaaaaaagattgtccgccatttgtcgaacctccaggaggtgtacccgtcttgccgaagcggggaaacggcggctcgtggaagtatccacgagatccattggtagcagctgaggcagtaaagagtgcagaataccggtgcgagctattccccgagcaccaaacattcaaatccagctcgaagaatgtaccgtacgtcgaggcgcatcaccttatccccttaagcaggcaggccgattttcaattctctctcgacattacagcgaatatcattgcactttgcccgacttgtcatcagcgcttgcaccatgggcatgcatccgaaaggcgcagtcctttgcgacggctactgtcacaacgaaaggatcggctccaggagaagcaaattttcatcgaggaggaaatattgcttcacatttacagcaatgacatactcgataacgaagattgaacgcaagagctggagattacccgtcagcaactctttttgaagctcgccggctttgcctccaaacaacgggatagcattgaccctctgaatatatcaatagttaatgacatcgaccattcaacttacgttagacggttcttttttgcgtgacaacaatcacgtttcgctccgcgtccttgggcgatcgatgatctctattcaagccgccgctgaccgcgcttatcttgacataaaatatggcaatatctggaagcatgcgcgattgccaattgccttctacgatgacgcagattttatagttggggacccggaaaagggaagctatataataaagttcctctctgagcaaggagaagccattgttaagcgactacgacaggcaattgcagacccctatcgttcggccatagagggtggggagcaagagatattctcgattaaacggcagatcgaggcgcgaaaaaatcaagtagataacgtaattttggttccgcagacatttgacgagttcttgcaagcccccgatgaattggccacccgagcttatggtgacaaatcgattaataagaatattgatcatatgcttagcccggtaaggaaggatccggatgcaattctaaagatttccctaaagcccaattaccgcgaacgcacggaaacattcacttttacccagaaggaggcaatcgctttcaagaaggtggtcagtcagcggcaacttggaaatcctgtgatctaccatggcagactaagagcactggatcgggggcacaatcaaaaggcaaacttcaaaggcaaattcattaatgcggcgaatgatcgcgacctggcgttattcatccaaagcgagcaggattactcggatctagtcccctatatggatcgggagaatctcacaattgtggcatgtcctattgtggagtacgactcgttcgatcccgtcgcgggagatattcaattcgtgaagattcttactgatggctgagaaatcgatcgacaatcttcgagagcagtgccttgagctgctactaaatattgtgccaatcagtcagattggcttcatttttgttaccgccgtcgtttttcagagactagccgagggctctggttcatcggcatttggcgccttatcagggttgggcctgaagaatttgtttgccatcagcgatgggttgttttggagtgtcggcatcgtcctagtgggtgcgtgtttcttcttagcgctaatcaacacctacatattaaaactcgcactacgcaaatcatttgaatcgagccggatatcggagcaactgttacgctggatctctgtcgcagcgaagtctatggagggtttggataaagatgatcgcggaccaattcgagattcaatcagcaccgaattaaccagaagattaaaaaaatatcattcaaagcgaatgctgagcgagtccctcttttcgatttcagcagttatagtttacgcatccatttatctgatatttattaaccactcaaatctttccaaaatagaattttcttacctagagttgatcgttggctccgttagcacgcttttgtgttttttttgccaccggaactccattcgatatgcactatcgagggtggtgcctttgcaagtgtgcttgacggccatgaccggtgagctcgctttttccatcgatgctgactaattcctctcgatttcattcggctatgctctatcagcagcacctttccagtgcctggatcagaacggcgtaaggccacataaccccgcgccgtttttgctttctgcgccagacgccgccttcgctcatcagacaagcggctgcaggcggtcgcccgttctggtcgagccgttgatttgatcggaaacagctggtcgtagagaccaatgttttcggggacgacgcctattgacccagctcaaaccagctttcgactccccaccaaagcagtatttaccaaaaataccaaatcagcacatctttgctgtttttggaggggacaaatgcctttggacaccaatgaacggttcaatcacatccattacgttccaattctcaaatggaggcaaggcgagtaccaggcactatggcgcttgagcgatgccgccaagcaatggataacaccgctactagaaattcctactgagccatgggatttcgaaacagaaacgcccgcaaaatctttagatgagcatctcgagcgctttggaaaccgcctcaaaagtaaatgggacactcgtcgatgctttatcgactcatgctacatcgatggtgtcgcacaaatgtcaacaggacagcatcacctcgagttcctgttcgaacaagctcggaatgaaggagcttcaccgataccggttactgggcttggccgccatccagactatgacgcagcggtacacaacatcgttgctcaagatcagcggggcgcgtgcgttcgtctttccgctgaggactttagtgcctctattttgaatgaccttcaaaacttgtttgctcggctaaatgtggggccgcccgactcacacctcgttatagacatggcggaggacatcagcggctcaccggtcgcgcaaggtctcgcatggaaggcactgcttcaacagacgccctggctaaacgactggaaatctgtaacagttgccgcaacggcgtttcccagcgctctaccagcggcacagttccgtccgcatggactcacaccaagaacagagtggaacgcatataacgccctgttgacaaacttgggtggcctgcgcattccaacttttggggactactcggtttcacacccacagaccgagctactcgatccgcgtgtgctcgatccaaacgcgaagatcaagtacaccgttgatggcgaatggctcgttcacactggtgcccaagtgaagaagcatggtaggggtcaatttcaaggactatgccaagaactgattgccaacccgtcagcagctttcccaggaccgacttactcatggggtgatgcatatatccatgggtgcgcaagtggcaccgaaacgacgggcggcacatcgacatggccttcggtcggcaacaaccgacatatcaccaaggtcatcagggatgtcgccacgttgttcgggtcttcaacgattccctgaccagctgccgaagctcactaagtggcaccaaggccgcggcaatctcatacaattcgcgacggttgccgcggagccttcgtttttcaacgcctcgctcctccaggatcttggttacctccggacgccacagtaggtgggcgacatgaaaggccgacaccgaaggatttgctccaactgcgcggtgtgtttcgattgataccgcccctcgcttgcccacgcttgccaccttaatcccccaccatggtggcaatattgactccgccgaccctaggtgatgctctcccaccaccaaggtcgccctatccattgctttcgaataggcttcaacttgcgctggtaagcgttccagcgtgtcagcatcgcttttcagttcgtagccgtgcagaaatccattcactactgcaatgtcaacacggcacaagccgtgctgcaggccgagctcttcaacaaccagcacattggggtcagcaacatgttcggcgagcaccttccggaatacggccgcccgaacatcgcgatctctagtcttgttggtcatagtggagctgcgcacggatcgcgccagcgatgtgctcaatagttcgcactcgaagaacgacagacattttactctgtcggctacgagtgtgcgtctaggggcattgcttacaacaagccttttgctcgctcttcagcagccacggaagcctgaggcaggacgccccctcgcccgggtagagcccgaaagcctgagggtccccactggaccccaggggacctgaggttgcggaagcatatattggtctcagcggactcatccgatcagacttggtcagccaacagctgacgacttcgcggcttccaccggatctctgtcaggaaacacagtaataaatggagcgccgtcaggaaccaaaagccggcgggacttaagacagaacggcaatacccatagccgcaggccctctactttggggaactcgaacaccgggactggccgctcaaacgaggcggttttcgggtagatcaagacgacatcccccctaccgctcaggtagctctgaccataggcctgcagttggtagaagtcactttgcgagaggccgtacttgtccgtgccattcgctttcatcccgtccagcagtttccacttggtatccagtaccagcaagtcccggtttgcattccggatcagcaaatcgggcttcagccggaaccagttctgttcacgatggcgaaccaggtgatgactacgagcctgtgatttcaggatcagcggtcgggccagctgtttcgccaggtgcttggcgacgaatgcctcgaatacagcctccatcgggaacagcatcgacggcgcacagtgcgcgccggcgccagtcaaaggcgattcctcgtcgaggatgagccgcgcccaggccagcgcgtcagcgtaataacccatgccacggtccagcctcacccgctgaaagtcgatctgaggctgtgcggaaactggtacctccgcgaacacgaacgccagctcgcgggccagttggttgagctgcgaagcagataactccaatacacgccgcaatgcggcatgcaaaaggcgattctctggacggtcgattgtgaactcgtcgtggtcggtgaagaatcggtcggcccgatacaggttttgctgcaaatgcggcgcgatcaacagcttacccctcagggcatagaggttgtcttggcggcttgaatagtcgctgcgcagcccacgctttacgatgtggtcaacggcgcgcaggaattctgcaacgaagacctccaacaatggcatccgcgctgccgaaatgttggcgctgtcggttttaacgtggcggaagccctggaggcagcagagcatttcaatcagaagcttacgcgcctcgacggcgccgccgccgatcgccttgccgaccttgggcaacacctcgatctggaagccgtccggtgcgcggatcacgccaacaaaactggtcacttgaacgacacgacgcccgcggcgctgggccaggcgcagccatgccgcctccccttgctcggcagcccgcaagcactggtcttcaagccacccgtagaccgcatccgggacggcgtgcaagccctcggtacctgcaacgcccgccgtcgccgcgatcagcgtctcgaattcgaaaatcgtgatgccgttcacttgcatcccgaagatcaagtcgacaaggtctggtagatgccgatgtaggcatccaaattcgaaaacgcggcctcctgcaacgcgtaccggcgcttggagccgtagctgtccaatccgtggtcactaccgaataggcgagccagatcgtcctcgtgatcctgactttccgccacgaactgtgcagctgccggcttctgattgtcggcgagaacaagacgaatcttctgccagtcctcgaagaagtactcttcgagcaggggcaggatgcgcgtgctgaacacctgctgcagcgccaccagtcgttcgtcgccgtcagggaacttagccaacgtcgtgaagtatgcgtggccgatgcaatggtcgcggtcgtagagtgcctcgacgcgctggttgatcgcatcgagcatgcgcggtacgtcgatcacctgctcgcccagggtgacccgcaggcccgcaagcggcgcgcccgattcatcgcgagcatccggcatcaccggcacgaattcgaaccggcgacggagcgcggtatccagtagcgccagggagcggtctgccgtgttcatcgtgccaatgatgtcgacattcgatggcacagagaagccgtcgccggacggcaaggtcaccgaaacggcgttgtcggcgccttctcgcttgtcaggctcgatcaaggtgatcagctcgccgaatatcttgctgatgttgccccggttgatctcgtcgatcaccatcgcgaatcgctgatccggtgccgatcgtgctctacggcacagttccttgaagacgcccgcgcgaatctcgtactgaatttcgccagcctctgcgtcgccattgagaaccggccggagcccctcgacgaactcctcgtaaccgtaagactggtggaaggtgacgaaactgtagcgctggaccttacctgatgccggcgcaccgatttggtaggccttcacggtttcgatcacgtccgcaacggcttccttccagtcgcctgcaaactgccagacagagtccgttgtcttgtcgaacacggcgggcgcgagacgcatcttggtgttgacggtgtgtgaatcctcgaccgtatggtgttgcagtgtgccccagagcgtttgcctcacgttctgcttgcgcccctttgctgctgcaattgcctgaatgaacgggtgctcatatagctgacccactttggccttgccgcccaactcatagagcgcagcggcggcgccttcccaccatgtcagggtagcaatccgagtagcaatcaactgttctcgccattccgcgttggacacggcggtcatggcctgctcgtactcccgcttgagcaatttcgacagctcataggtctttcccgtgccaggcggaccgtaatagatgcggttgatgggttgcctcacctcatcgttatcggctggctcctcctcatcggagtcctcttcgggctccaccgggtcgtctcgcagttcatcgggccacagacctggacgctccgtgtcgagcaccagccagtcatcgagtgaatctcgctcagccgacagggctgcctcgatattcgcgaccagccgctccgtcaacggctcgcggtgaagcttgggcacctcgcccagttcccgcgtccatgagatcttccggatccgggtgccccgaatcacgccgagcacaccgacggcgcgttcgctgccaggattcttgcggccaaagcgcacctggacacccttgcccatgtgccaccaatctagaccggcggcgtgaacgactcgcgccaaccgacagaataacgccttgtcctgggcagaccatgaggcgcggaaggtcctgaacactggcttgccgtcgaagtgcttgagcaggtcctcgtcgctcagcttcttgcccaggttcagcttgacgacgacctcgtcgtagcgcagcttaaagttgcggatcgcttcaacactccacgcaactagttggtccagcgacttccccagtccatcggacgctggcagtgtagcgatgaagggggacgtgttgttgtaggcgccacgcagtgctagataggcctttctcgtcgcgtccaattcgtcgagcccaacggtatcgatcttgactacgaagccgtcatcggcgccgatgccaactgtgtaagccaactctttcggcgcctcagatgaagggtagattttggcccagttgtagctggcaaagttgttgccctggttggtcgggcgcttacgaatctcgacgcgcccgacagggaacaactcggccttaaccttgtccgcccacgcctccgtcacctcgtaggccttcttcagatcttcataagcgcggttctgctcggggttggactcgtcacgcttctgccccttccacttgttcagcagcttgaagtagtcactggtgaaatagtcagccatcgttctttagattccttcaacatcgattccatgctcggccagccaggccttgcgttgcgcatagtccggcatggcacgctccactcgaagccagaacgcaggcgtgtggtgcggctcatgcagatgggcaatctcatgcaccacgacatactcagcgatgcgcgccggcagcaggattgccttccagtggaagtacagccagtcgcccttgccacacgaaccccagcgatatccaaggtcctgcaccttgacgccggcaggcgtcacctccattcgcgactggtagtcagctacacgccccgaaagccaggccttggcacgctcgccgtaccagcggatgaaatgctcgcgcgcggcgggtagggcgtcacggcgcagacaaaagcggcctccattcaacttcagtggcacattctgttcatcgaccaccttcagccgatggctgcggccgagatacaagaatccctcgcctccgacgaattccttgcgcggaacctggcgctgcaagcggtccttctcggccagcttggtgtagatccagaagcgcttctccagcacgaatgctcgcagcgcggcctcgtccacctccggcggtgcgcagagcatcaagtcgccactgcgctccacggtgatctgcatagttctgcggcgcgcgctccgctggagcgtgaaccggaggtcaccgatctgaaggcttggcaatttcaccggcgaaggcatcgaatcacacctgcatcagcttgtcgtggctggcgcgagcctgatcaatcagcttgtcggccagcacaccggccctgtctgcatctaacagcggtggacgcaggcgcatcagatgctcgaacaagacaccgtcgcgaagattctcctggtctggaatcttgttcgcgctccagatcttcgggttctccttgagctcctgcaccagcaagtcaacgagctcgaccgtcacgtccttcagtcgaagcagttcggccgacgtgggcgtttgcccggcgcacaccacatccagtacggtgcgcaggaagggcgcgcaatgctcaggcaggtcacctggagtattgtcggagctagcctttccagtgcgcaactcgtcgatgatctcctgcagctgtgcgataacctcattccacttctcgccgagcgtcttcaggatgtcgttcagccgctcagagagcttgcgatacagcaccggatcttcgtccgtgtgcttgcggatatgcgagcggatcgcgtgttccatctccgaggcctttgcgcgatcgttgacggtacgtgcaagatgggtgtcgaactcggcatcggtcagctggatcggcgggacctttggatcgacacctagcgagattacgtggtcgtcgatcagcttgcgcacctttgcgccgacgtctttgcccaggaccggcgtgtccttgtaccggttgcgcgcccgggcatagatgtaggctagccgcttcgcatcacccgagtacggcagcccctcggggcgcggcagtaccgtgtcaagcgacgccagaaacgccttgagcttgacggcgaactcggcccgcagcttctcgctgcccagcgcttcgacgcacgcctcagtgtcgtccagcgattcaatgccccgttggcggaacaggtctgccacacggagatgccggtcgcgtagcaccggcacctcgtctttcaggctggccagcgcgccttccacgtcctcgtccgcgtaggcggcgagagcttccttcagatgctgggcgacaccgtagtagtccaccacgatgccgcaacgcttgccgaagcctgtgcggtttacgcgggcgatggcctgcaacaactccgcttcgcggattggcctatccaggtacatcacgccctcgataggcgcgtcgaagccagtgagcagcattgacttcaccaccagaaatgcgagcggatcggtcttctccggcttggcatggaacagtggcttcttgaatcgcttaatcagttggtcgtgagccgcggcatcagtccagtttttccaggcaggatcgtcgttattgctgccggagataattggtgcgaattcgatgcgggccaatatgccctggtagcgccaggcttggacaactgcctgcatctttggcgagcgctggcacagggcttcgtcgtccagggccttgtcttccgggctgagcgcctgcgcctctagcagcagttcgtccctggccctcctcaaggctccgaagtagcgaatcgccgccagccggctgtacgccacgacctgtgccttgtagccgttgggcaatatgttggtgacgtagtggcgaatgatgtcacgggccttgtcggcaatcagcgctggcgcatcaaagatgtgccccttagtggcgtacttctgcttgattacctccagttcctctggcgtgtgctggcgaaacaggtcttcgaacagctcgtccagactggcgccgtccttgatcgcaccgttggcggtgcgcccctcgtagagcaccggtaccgtggcgccatcggcctcggcctccttgatggtatagcggtcgatgaactcgccaaagatttcatgggtacgcttcttctcccccatgatgatcggcgtgccggtgaagccgatacgcgcgcagtttggcagtccggccagcaggttggcgtgcagatcgcccgcctgggtgcggtgggcttcatccacgagcacgagaatgctctcgtcctcgttcagcacctcgaacttctctccggtcttataggtcgcgcgcggctgctccaactcaggcaggtcttctgccgccagcggtgaatcacctgccgtgtccgggtcccggtatttttggatggtggcgaagatcagccccggtcccttgcgccgcacgagagccttaatgcccgccgtgctgtccgccacttcgaccacctcacccgtgagcgtggcggtcacggatagctggctctgcagatccttgcggtcggtgacgacgatgaccttgaagcgtcgcagctgcgcttcggcgcgcatcttgcggaccaggaataccatcgtcaggctcttgcccgagccctgggtgtgccaaatgatgccgccacgctggtcatgctcaccgtgctgcaaacgagtctggcccgttctgagccgggcgatggcacggttcaccgcccggtactgctggtagcggcaaacggactttatagtttggccgcccacctgcatgaacagtaggaagttcttcaccacgtccagcaagtgcgctggtgccagcagcccggcgatcagccgctcttgttcattgagtttgctctcgcccagcgcctgcgccacctcggcctcggagcccgatccgtccggtccgacgactgtcttccactgcgcgtagtgctcgaaccccgcgccgatgcacccgacccgtgcctcgtccacgcagctggcgatcagcagctgattggtcgcgaacagcacctcgttgccctcgttgtcatccacttcgaaggccgccttgcgctgattgctgtatcggcgcagttgatcgacggcctcggccagcggctcagggatcgatgggctcttgcactccactatcaccagcgggatgccgttcaccagcagcaccagatcgggcacgatgaaggccttcgccgaattgaacccaggcgggcaatcgacgcggtactggttgaccactgtgaagcggttgttcgccggaatgtcccagtcaatgtagcggatggtctggccgcgtccgccatcccagccaggtaggccttcgacggtcaggcccttgatcagcaactcggtggccctttcgttggcctccatcagcctgcgcgttcccagccgagtgatagccgccatagcctctgatagacgcgcatcgtccacccagggctggccgtcagggccggggtttagcgctcgcaaagcttcgcgcagcacgggctcctggataacctcagtaaagctggtacggcaggtagatgtcgggttttcgagactgccttcgatgtgtgtccaaccctgcgtctgtaactgagcgacgaagggtttttcgacgtcttcaagctcccagcccatcaggcgctccctgcttgtttggtttccgccagctgcggcttgacgcggacgcggccggtgaggaggtcatccataaggccagatttctcaagtcgcatctttcggatcagttcctcctcacaccagatttgttcctgcgcggcatcaactcggtcaacgattgcctgttgctcattgatcgtcatccgaggtagaggaagctcctggcatagagcgagggtcagattcacttgtcccgacgtctgcttggctcggttcctcagccaagactgcgagattgagctactaagccagattaataggaactttggcagtagttgttcggttggtcgaaataacgcaattgcttgattaatattgacctcaccaatttctttggtaacaagccccagtttccctagaggtgggccaacgatgttcgtcagcacatcaccttcaaggcatcttgaacgagccagaaaacctttgtgcgtggcaaggctaactcgaaacgtgcttgcatctagatccagttgtccatcgaaagaaagattatcgactcgcagaaacctaattcccgcgccaccctgccacatctcattagccgcaggggtagtgcctttggttatcagatggcagcgagttgctgtaggagcaagaccccactcattcggaatccaacccaacggtgacgactcgtagagatgcggtgcctcggcctgaggtgggcgcaattcgccgttggcgtcgatgccgcgcgtcaagaggtcatgcagcaggccttgcttgaccgccttgagcttggcgatgatcgcttcagtttcgtagatggcggtgtcgagagtgtcgaggatttccgcaagtaattgctgctccgtagagccaggacaaaagacctttatcccctcgagaagctctcggtcaacgtgtggaatgccagtgccattggtttgagccttcaggaatcgctcagcttgcttggcgacatgaaaaaagtatgccggacgaaaaacactgctcggagaaatcttcgtcatcgtcgaagcaaccaacccgaccttggacctgaagaattccccagcgttcgaaccgtcccacagcagtatcgtttcgccttcagcagcacgcacagcatccggcccagctttggcaaggtcggccggcgctcgcccgcggagatattcaggactcaggtagggctctgcacccttgcccacgtagccggtgacgagtggtgccttacccttctgaacggtaatgtgatctccaagggcaacgaagttagacataccgcagccccttcaaaaacacctgcaaggcctgcgccgccgaatcgcgctttccctcaatctcagtcagcgtcactcggtacttatcccaccagttttcgaatgcgacgacgatggccttacgctgggcggcgatgtagcgctcgacgatggcgcgcatgtcgttgtgcaggatggtcagcagcagctcggcggcctgctcgggcgacagaccatccacctcgcgattgaggtgcgcagcgaagctatccttcttggccttcaaggctttcttcgcggtagcgagttccttcttccacgccttgagctgcgtttcgtcgaccgcgttgtcgtcggcgggttcgtcttccgaagactctgcggcgtcaccttcgtcgccctcggcgtccttgccagatttggggtcagcagccttgatttgactgtccagttcagccctcttggcctccagctcgttgatggcatcgacgaagtcgctcatcagaaacttgactagcttgtggtcaagtggactttccttgttcgctttgtcctccagcgcagtgacgatgctggtgcgccaagcgtcggccacgcccttggcgccacgcgccatcagggtgaggaagtcgtacttcgtctggtaccagaacccagcgacgatgccgcgcacctggaaggggtcgagcataccgatcgcttccagcgattcgctaaagctagccagcagatcgttgcgcaggccgaccagactggccgcattgtccatttgcccagcaagcaacgtaatacgcgcgctatgctgatgccaccactgctcgaaagctgcgcggatggcggcctccttggcgacaaggccggcgtttctctcgatggagggcttaaggtccctgcgcttggctagctcgggtttgaagtcgacgtacttcgcgtcacgctcaacgaacaggtccatcgggttgaggccgtgcgccgcgaacagcgtcgacttggcctgcacctcggcttttggcacgccccccacaagatgcgcgcgcacgtcgtgtggttcgggcggtggtgtgttatcagcgtagcggcggatgttgaggttgtaatcgttggccttgagggtggcgttgtccacgatggccgaaaagccctctacctgcttgaactcgttgaaggtggtgacgatcttctcgatgtgttcgggtagcagatggttctgcgcgcggccttcgaagaactcccggtcggcattgataaacagcaccttgccccggcgctcggcgggcttgccgctaacgcggttggcgccgttctgcacccgctggcgcagcaccaaaatacaggcggggatgccggtgccgtagaacaggttgggggcgacgccgagcacggcttcgagcaggtcgtcctcgacaatgccagcccggatggccttttcctcaccgccacggaacagcacgccgtggggcatgacggtggcgaccatgccgccgtcgcgggtaactgccagcatgtgctgcaggaacatgaggtcggccttcttggcgcccagcggcacctggccgtaacggaagcgctcggggaacttgggcgaccaggcaggcgttccgtcggcgttcttctccgtattgccccagttgatggagaacggcgggttggtgagcacccggtcgaagtgcattaattcgccgccttcgacgtgctgcggctcggccagggtgtcctcgttctgcaggttggcagtgctgatgccgtgcagaagcatgttcatcttggcgatcgaccagacggtaccattgaactcctgcccgaacaggttggccttgcggccgtcctcgccgtgctcgtcgatgtattccttggctgcgatcagcatgcctccggagccgcaacagggatcataaatgtcgtgggccaaggtcggctggatcagccgcaccatcatacgcaccaccgagcgcggtgtgtagaactcgccgcctttcttaccggccgagtcggcgaactcgccgatcaagtattcgtaggccgcgccgagcagatcggggaactcgaagtcctcgttacgtaggcgatagatgccgaagtgggtaatcagctggcgcagcttgatatcggggatcttgctctggccaacctttcgcgtaaagtcgatgtgctccagcacgtcgtagagcttggtgttggcagtctcgataccgctcaatgccttgttaagcgagtcaccgacattttgatgagcctcatccaataggaacttgtaccgcgatcgtggtggcacccagaagtactcggctcccttgtaccagcgctccagttccgccgatttttcggcgttagcgcgtgattcacccgcattcattcgctcggcgatgacttcctcgcgccgctggtcgaacacgtcggagcagcgcttgaggaacagcatcccgaagatatattccttgaactcggaagcgtccatcttgccgcgcaggatgtcggcggctttgaacaaatggcgctcgagctggggtaacgtaaggggcatatgtaactatgggcggattcgtcgaacagataatcacaggcagatttgccacctctatcgaggtaaattgtcatcgttgtaggtgacgtttggcaatccacagagagcagtacaccaaaaaaatatggttcacatggagggagctgaatggctctgcccaaaaaagaaagccaatccaataggactggcttttttagcttcggtcactcagtaggtatctaccccctgagcagcgcaatttcgtcgatcattttcggcttcatagatcaaacatcaatattccgcgccaccaacgcattgctctcaataaagttccgccgcggctccacctcatcccccataagggtggtaaagatctgatccgccgcaatagcatcctcaatctgcaccttcagcaaacggcgttgggtcacatctagcgtcgtctcaaacaactgctccgggttcatctcccccagccccttataccgctgacgagaaaccccacgctcagcctcagccaacagccattgcatggccccgtggaagtcattgacagtctgatcccgcagcttttcgccttcaccacgctgcaccttggtgccttccggcgtcaggccctggaacgtcttggccgcgttggacagagcagcgtagtcagcgccatgaacaaaatccgcatccaaatgcgacaaccgcacgttgccatgatgacgccgcgcaatcatcaaccgatgcttatccgtcttctcatcaaactgcgcgtagacgtcagcggtgccgtcatcattcacggcagccccgatcaacgtcttggcatgcatctcagccaacttagccttcaacgccacggcagacgcctcagcagcagccgcgctatccagatccaacggcaccccatcagcaatagcacgcagggcgtcagtatccacaacacgtgacagccgagaaatcaccccctcagtcagctgatactgccgcgccaactcagtcagcgcatccccattgatctccgacccatccggccgcaccagcacagccttctccatcgccagcttcagcaggtaggcattgagctcgacatcgtccttgatataccgctcttccttgccgtgcttgatcttgtacagcggcggctgcgcgatatagacatagccgcgctcgatgatgtcgggcatctggcggtagaagaacgtcagcagcagggtgcggatgtgcgagccgtccacgtcagcatcggtcatgatgatgatgcggtggtagcgcagcttgtccaggttgtagtcgtccttgccgatgccggtgcccagcgcggtgatcagcgtcagcacttcctggctggacagcatcttgtcgaagcgggcgcgctctacgttcaggatcttgcccttcagcggcaggatggcctggaacttacggtcgcggccttgcttggcggagccgcctgcggagtcgccctccaccaggaagagttctgacagggcggggtctttttcctggcagtcggccagcttgccgggcaggcccatgccgtccatcaggcccttgcggcgggtcatttcgcgggccttgcgggcggcttcgcgggcgcgggcggcgtctacgatcttgccgcagatgatcttggcgtcgcccggggtttccagcaggaagtcgttcagggccttgccgacgagttcttccacgggcaggcgcacttcggaagagaccagcttgtccttggtctgcgagctgaacttgggctcgggcaccttgacggagagcacgcaggacaggccttcgcgcatgtcgtcgccggtggtttccaccttggctttcttggcgacttcgttttcttcaatgtacttgttgatgacgcgggtcatcgcggcgcgcaggccggtcaggtgggtgccgccatcccgctgcgggatgttgttggtgaagcagagcacctgctcgttgtagccgtcgttccactgcatggccacttccacggcgataccgtctttttcggtgttggcgtagaagatgttggggtgcagcacgctcttggagcggttgatgtattcgacaaaacccttcacgccgccggagaaggcaaagtcttcttccttgccagtgcgctggtcgaccagcttgatatgcacgccgttgttcaggaacgagagctcgcggatgcgcttggagaggatctcgtagtggaactcgacgttggtgaagatctcttcgtcggccaggaagtggacttcggtgccgcgcttgtcggtggcgccgatgatcttcatcggggagacttcaacgggctggccgtcggggccggtcacggtctcgacgatacggttctgcacgtcgcccttggcgaattcgatcaggtggacctggccgtcgcggcgcacggtcaggcgcagccacttggacagcgcgttcacgcaagacacgcccacgccgtgcaggccgccagacaccttgtagctgttctggttgaacttgccgccggcgtgcagctcagtcatggcgatttccgccgcgctgcgcttgggttcgtgcttgtcgtcgaacttgaccaggggcgggatgccgcggccgttgtcgacgatggagatcgagttgtcgctgtggatggtgacctggatctcggtgcagtagccggccagcgcttcgtcgatggagttgtccagcacctcgaagacaaggtggtgcaggccggtgccgtcggaggtatcaccgatatacatgcccggacgcttgcgtaccgcctccaggccttccaggatctggatcgaagaggctccgtaggtgttttcctgctgcgggttctgctgttcggtcatgtctttctactcacggcaatggcggaattcgggccgggccggcatagcggcggggcgcgaaaaggtccgcatggcgggttactaaaaacggcaaaaggggcggatcgtcgtttcgatcctgcccccgctgcgggatggtcatccccaggacttcccggcctgggccgggtgtcgttgcgtgccgtttgctgctccggttcttgtctggtctggtcctgttaccggatcatcagatgcgcatcggcatgacgacgtacttgaagttgtcgtcttccggcacggtaatcagcgcactcgaattcgagtcgccgaggctgacctgcacctgctcgctcttcaggttggcaagcacgtcaagcaggtaggtcacgttgaagccgatatcgagcgcgtcgcccgagtaatcgagttccagctcttcctgcgcctcttcctggtcggcgttggtggagctgatcttgagcatgtgcgtgtcgaggatgcagcgcacgcccttgaatttgtcggtcgtcaggatcgcggtgcgttgcagcgcctgctgcagccgcacacggtcgatggcgaaggcgttcttgtagcccttgggaatcacgcgctggaagtcagggaacttgccttccaccagcttggagatcagttcgatattggcgaacgtgaacttgacctggttggcggccagttgcacctgcaccggatcgtcgttgtcttccagcaggcgctgcagttccaggatggtcttgcgcgggatgatgacttcctggcgcgcgcccacgccgacggcttcggtttccagctcaacgccgcagtaggccaggcggtggccgtcggtggcgactgccatcaccttcttgccttccaccaccagcagcatgccgttcaggtagtagcggatgtcctgctgcgccatggcgaagtggaccatcgccagcaggtgcttgaaggtcttctgcggcaggctgacgctggcgttgaattcgctggcttcggcaacggtcgggaattcctcggcggccagcgtctgcagtgcgaagcggctcttgccggattgcacggtcatgcgcttgtcgttgagcgacagggccacgtcgccgtcaggcatggcgcgcaggatgtccagcagcttgcgcgcggccacggtggtggcaacgctgtcgctgcctacgccgcattcggcgtgcgtggtgatctggatctcgatgtcggtcgagaggaaggaaacgttgaacccggacttgcgaatcagcagattggccaggatcgggagggtgtggcggcgctccacgatgccgctcacgatttgcagcggacgcagcaggttgtctcgcgaggttttgaccaattgcattgaatttatccttcgtcgtttgtaatcggcgaccgcagaacgcaaacaactccgaattcacttaggaatcaaggagttaatatgccattgtaccaaggataagccgctgcggtgaagcggggcgggaccggccggggggccagctgtgcccaaaaagccacgctggcgctgcccgtacttgccatcccgtcccgactcaccgcaaagccttatcagtggccattttccggacacttgccccggcgacgctgacgttaattccccaggcgccacgggatgtccgtggcgcgcaccctacagtatgccagccccgaggggccgacccttcaaaacgccttcccgggggtccccgggcatcggccatgcatcagcccttgagcgtttgctccagcacgtgcagttcatggttgagctgcgcgtccttgctgcgttcgtcggcgatcttgcgcacggcatgcagcacggtggtgtggtcgcggccgccaaagagctcgccgatttcgggcaggctcttctgcgtcagctccttggccaggtacatcgcaatctggcgcggccgtgcaatattggcagggcgctttttcgaatacatgtcagcgaccttgatgttgtagaaatccgcgcaggtcttctggatgttctccacggagatctggcggttctgcacagtcagcaggtccttgagcgcttcgcgcgtcacctcgatggtgatgtccttgccgtggaagttgctgaacgccaggatcttgcgcaacgcgccttccagctcgcgcacgtttgagcgcaggtgcttggcgacaaagaaggcaacctcttcgggcacgttgacgttttccgcggcggccttcttcatcaggatggccacgcgcatttccagctcgggcggctcgatggccacggtcaggcccgagtcgaagcgcgagatcaggcggtcgtcgatgccggaaatctctttcgggtaggtatcgctggtgatgatcacctgcgcccggttggcaatcagggcctcaaaggcatagaagaactcttcctgcgtgcggttcttgccggagaagaactggatatcgtcgatcagcagcaggtccagcgagtggtagtagcgcttgaactcgtcgaacgccttgcgctggtacgccttgaccacgtcggacacgtactgctcggcgtggatgtagcggatgcgcgcgcgcgggttctccagcaacatgaagttgccgatggcgtggatcaggtgagtcttgccgaggcccacgccgccatagagatacagcgggttgtacgacttgcccgggttgttggccacctggatggccgcggcgcgggccagctggttggctttaccagtgacgaagttgtcaaaggtcaggatcgggttcaggcgcgagcgctcatgcaccgtgtcgctgggctggtggccgggcatcggcgtggcgccgcccatctgctggtgcggctgctgctggggttgctgcggcggcgcgcggtaggagcgggcgctggcttcggcggggtccatctggaccacgtcgatctcacccatgtcggcgccgtgcggctggtggccgtgctggccagggtggggctggccgcgcgcaccggccgggaccggtgcggcggacggcatgccggccggattgcccgggttgcccggattgccatagggcggttgccccatgccgtagccggccgcgctgaccggctcgccatagccatagccgggctgctggccgggcatggcgaacggcggctggcccatggcctggccgcccatcggctgggcgccgggatagccgcccatgcccgtacccggtgctgcgtggccgtccatgccgcccgggcccatgccgggctgggccggctgcatataggcagcggcacggcccgaagcggcgggatccagcacgaactggacgctgacctgcgcctcccagtactcgcaggccagtgcggtgatgcgccccgaaaactggctcttgacccagtccagcttgaaacggttgggcgcggcaatgcgcagcgcgtgcgtttcttcatcgaacgcaacgggcgccagcggcttgatccacgttttgaactgttgcggcgtcagctcgcgctctagttgcgctgctgccgcctgccagaaatcttgcattgtttgttttttggtaatcgtacccggccgcaaatcagcggttcccccggcacgccacaagcagcatctacgccgcgcgatccgggccatccttaccgtattaggaatcaattccgttcggtgaggcctccgcggcatgccaatgcagcagcaagcgagccttcaggctcgccgcactggcgtgcgttcagtcatgcgttgccgcggtgggggcccgggttgcgcctgcgccacgcagcccgtgttgtgtttggacccggattgtacccccgcccctgagttatccacaaaggataagtctgtggataacttgtgcaaatgcagtggatttgtgtgcacaacccttggtgcgatgcggctttccggggtgtggaaacgggggaaatctcaggcaaaacagggacttcgcctgtggatggatgcggtagaggtggccctcgggacacttgcagttacccactggcctttgtggacaatggcgcaccacgggccacagacgggtgtggcaattgtgccggtgcacatagtcttgcgccttgacattgccgcagaaaatcggttaaatgccgggttctgcgatgcggcaggggatcacgtatgcgcatcgccgggtctggcctgttcgtgccgtccttgctaacaggttagcgacctgcacatgcataaacacggccggcagcaagacagaaccagaatcgtcggcaatcccgctgcagtgtcttgccagcggcagccccatgcgaaccatacgcggcggccacggcaccccggcaccggccggtgtcaggcgcgcccagatcaaccagagagtgcaacatgaaacgtacctaccaaccttccgttacccgccgcaagcgtacccacggcttccgtgtccgcatgaagacccgcggcggccgtgccgtcatcaacgcacgccgcgccaagggccgcaagcgcctggccatctgaggccggggcgactggtatgacggcgcgcactgcgttgccgtcatggcctgacgcctcacctcagggacggccggcagcttgccgcagggctcagctagttagtcagcagtatctctcgccagcattgcccagcgtgtctgcccatgccttccccaaagccgcaaggctgacaaagacggatgagttttcatccgtttttgctttgcggccccggcgtcgcagcccgcatttcgtgctctatgtgcgcgccaatgaccggccggaaggccgccttggcgtggtggtgggcaagaagttcgcgccgcgcgccgctgagcgcaacctggtgaagcgcatggcgcgcgagctgttccgccagcgccgtgagcacctggccgggcgcgacgtactgctgcgcctgcaagccaggttcccgcgcgcggaatttgcgacgcgcgcggcggtcagacaggcgtgcctggcggaaatcaccagcttgctggaaattgccgccaggccgctgccgccaccgccggcggcaaaccccgctccgcctgcgccacccagccaggcaccgggccttccagcctgaccaccccgccatgaagccgatcctgctagccctgctgcgtatctacaagatcgccctgagtccttacctgggctcgcgttgccgcttcctgccgacctgttccgactacgcccgcgacgccgtcatccatcacggcgccgcgcgcggcagctggatggccgcctgccggctgtgccgctgccatcctttcgcccaaggcgggtatgatcccgtgccgggcacggaagctgacgacactgccaggccggacacccacgcgggccgttccgtccatgccgccgcaggccatgcgcctgttgcgatccgtctgcccagaccctgatttctccgaccacagccagacatggatatcaaacgcaccatcctctgggtcatcttctcgatgtccctcgtgctgctctacgacaactggcagcgctcccaaggccatgcgtcgatgttcttcccgagcacgacccaacaggccgcctcggcgcccgccgccagcggcgctgccgcgcagggcgacgtgcccaaggccaacgtggcgccaggcgcagcgggtaccgctgccccggccgcgccgcaggccgcggcccagcccaccggcgagaaggtcgtggtgaccaccgacacggtgcgcgccgagatcgacaccgccggcggcatcgtgtcgcgcctggagctgctcaaggagcatgagaaggacggcaagccggtggtgctgttcgagcgtgacaacgtgcgcacctacatggcacgctcgggcctgatcggcggcgacctgcccaaccacaccacggtgttcaccgccgccccgggcccgcgcacgctggacggcgccgagcagctggaagtggcgctgaccgccgagaagaacggcgtgaagctggtcaagacctatgtgttccgcaagggcagctatgtggtcgacaccaaattcgcggtgaccaacgcgggtgccgcgccggtctcgccgacgctgtacctggagctggcgcgcgacggcagcaaggtcgagcagtcgcagttctacagcaccttcaccggcccggccgtctacaccgacgccgacaagtaccacaagatcgacttcgaagacatcgccaagggcaaggccaccgtgccggccgccgccaacaatggctgggtggcgatggtgcagcattactttgcctcggcctggatcccgcagaccggcaaggagcacagcttctacgtccagcagatcgatccgcacctgtaccgcgtgggcgtgcagcagccgctgggtgaactggccccgggcgccacggtgaccaccgatgcacgcctgttcgccggcccgcaggaagagcacatgctcgagaagatcgccccgggcctggagctggtgaaggactatggctggctgaccatcctggccaagccgctgttctggctgctggagaagctgcacggcttcctgggcaactggggctggtcgatcatcgcgctgacggtgctgatcaagctggtgttcttcccgctgtcggcggcgagctacaagtccatgggcaagatgaaggacctgcagccgcgcatgacgtcgatccgcgagcgttacaagaacgacccgcagaagatgaaccaggagatgatggggctgtacaagaccgagaaggtcaacccgctcggcggctgcctgcccatcgtgatccagatcccggtgttcatcgcgctgtactgggtgctgctgtcgtcggtggaaatgcgcggcgcgccgtggctgggctggatccatgacctgtcggtgccggatccgttctacattctgccgatcgtgatggccgtgtcgatgttcgtgcagaccaagctgaacccgaccccgccggacccggtgcaggccaaggttatgatgatcatgccgctggtgttctcggtgatgttcttcttcttcccggcgggcctggtgctgtactgggtggtgaacaacatcctgtcgatcgcccagcaatggcagatcaaccgcatgctcggcaagggcaaggcggcagtggtggcgaagagctgaagctgttgcaggttgcggtaagcaaaaaagcccggcagtgatgccgggctttttgtttgatggatcggggcgctgacagccatcacccctcattggccaccgcccgcctatagcgcaaccatgtcgaaatccgctttcgccatgccgcagtccgggcagctccactccagcgggaccgcgccccacggcgtgccgggcgcgatcccgtgctcgggcatgccgagcgcttcttcataaacgaatccacagatacggcactgccagatggtcatgcggccccccgcagcgagggcgcacgggtggagacgccggcggcgcgcgcggtgttttcgatctcttcgaccagcggggcgatgcgcgccagctcggcgcggttgtcgtcgtcccacggatggaagcccgggcggaagtagctgagccattccgggatcatcttgggcagcacgccgggcgaggcccacaaaaagcgcagcacgccgccaaacccggtcagcttgttgcggcagcccttgtcgcccatcaccagcgcgatgtggaacacgaacaccatggcccagaacgtcaccgtggtggtcagcatggtgaaggtgcgcaggaagtagcggtaggggccgggcttcatcaccgtgttccagacatcgtaggccacggccttgtgctcggtttcttccagtgcgtgccaggtccacacctgccggtagccggtctcagaggccgcgcccatgtggcgctgatcctgcagcaggccgccggccagcatcgcggtgtagtgctccagcgcgatggtgtgggccagctgccaggacttgggcaggatcttgcgcagcaggtccagcagcttccacaccgagcggtccagcgccgcggcgggcaggccggcgtcttccatcagccggttgtagaggatgtgctcgcgcgtgtgcatcgcttcctggccgataaagccggcgatggcgcggctcagtccggggtctttcacctggtcgcggtagttgcgcacgctgtccatgaagaagcgctccccggcggggaagaagatcgacagcgcgttgatgaaatgggtgacgtgacggccccgttcgtgccagtcgctgatgcgttctggcggcaggtggggatgcacgtcgcggcggactggcatcatggcggtctccttgggtgacggccggcgcgtgttgcgccggcggggatttattgggcggccaggaacggcagcaggtctgctgccacgcgttgcgggtcttcttccatcggcacatggccaagccccgcgtagcggcgcagctgcgcgccggggatgcgctcggtgaaggcctgcgcgtgcgcgggcgggatccagcggtcgcgctcgccccacagcaccagcgtgggcgcgcgcacgctgccgagcaggtgggtatcaagctgggcaaagtcgagcctgggcaccatcttgccgacggcctcgcggctgccttcggcgtagaagaaatcgacgtagcggcggaaggtggactccggcacgcgtgaagcatcgccatagacgtcgcgcgtggcggcgcggatgatgaactccggcagcatccacggtgccgaccagcgcaccggcgcatggcggaacaggtcgatgtagatcggcagccgcatctggaagccggcggcgtcgatcagcaccagcttgtcgaccgcatcgggccggcgcaccgccaggtcccacccgatcagcccgcccagcgagttgccgatgatgctggcgcggcgcacgttcaccgcggccaggaaggcatcgatgaagtcgcggtagcggtgcacgtccatggtttcgatgcggccgcgcgcatcgcgcagcggcccggtcagcccgaacggggcgaggtccagccgcagcacgcgatagcgctgcgccagcgccggcacgatcccctgccacgtatgcagcgaagcgccgaagccgtggatcagcaccagggtctcgccgtcggcggggccttcgtcggtgtagtgcaccatcgcatccagcacgcgcacccagcgcgaggccggcagcgcatggcgctgcgccagcgtggcgcgcgacaggctgaacagccctacgcggccctgcccgaaccagcgcgtcagcgcccccggtggcgccagcagcgcagcatcctgttcgatcgcgagccggttcacgggcgctctccctggccgaccgaggccggtgcggcaacggggcccagatcgcgcttgcggcgcgtctcgcgcaccaccagcgactggtaggcggcgggcagcagccgcgccatggcatcggcggcgtaggcgtcgggtccgatcagcacgcgccggcggttgcggcgcacgccttccaggatcacgcgcgcggccttgtcgggcgaggtgatgaagaatttctcgaactcatccttgccgtgctgcgcgtcgcgcaccaggaagccgttgacgctggatgacacgcggctggcctgggcgatattagtcttgatgccgcccgggtgcacggtggtggccgacacgccgcagtccatcaggtccagctcctgccgcagcgattcggtgaagccgcgcaccgcgtacttgctggcgttgtaggcgcccatgccgggctgggcgaagatgccgaagatgctcgacgtattgaccacgtggccgtcgccgctggccttcaggtacggcaggaaggccttggtgccgtagaccacgccccagaagttgatgcccatgatccattccaggtcgtcgtagctcatgccctcgacggtgctggacagcgccacgccggcgttgttgaagatcaggttgatgcggccgtgggcctcggcggccgcggcggcccacgcgtagaccgcggcgcggtcggccacatccacggtgtgctgggtgatgcgggcctgcggtgcggcggccatggcctgggccacggtctgcgccagcccggcctcgttgcggtctgacagtgccaggtggcagccctgccgtgccagcgccaccgccagcgcgcggccgatgcccgagccggcgccggtgatcgcggcaaccttgttgcggaagtccttcatgtccggtctccttccggtgatgtcgttcttttgggtgtgaaccagggggaatgcgtgtgcgtcaggcaccggcgaccgtggcgatatcggccggcccgggctgcattgcggtctcgtccggcaatgcgcgccgcaccgggtacaggtcgtagtcggtcatgcggaagctggccgtggcgcggcggaactgccaggtgaagcccggccacagcgtggtgttgcggccgctgcgcgggtcgatgtaccagctggcgcagccgccggcggaccagatcgcatggcccagccgcgcctgcagccgttcgttgaagcggcgctgcaccggctcgcgcacgtccaccgcctgcacgccttcgcggcgcatctgctgcagggcgtccgcgatgtaggccacctgcgactcgatcatgaacaccatcgagctgtggcccaggccggtattggggccgaccacgaagaacaggttggggaagcccgccacggtggtgcccaggtaggcctgcgcgccgtcgcgccaggcatcgaccaggtccacgccgtcaaggccggagatcacgccgcgcggcagcgggtcggtggcatggaagccggtacccaggatgatgcagtcggcgggccggcgcgtgccgtcgcgcagcacgaccgcgtcgcgctcaacgcgggcgatgccggtggtgaccacgtccacgttgtcgcgtgtcagcgccgggtagtagtcgttggagatcagcacgcgcttgcagccgatggtgtagtccggcgtcagcgttgcgcgcaaggcggggtcgcgcacctgcctggccagatggcggcgtgcgacgcgctccaccaccttcatgatcttcggatgcagcacgaagcccagcacgcgcgattccagcatccagtagatgccggtgcgcaccagcgtctgcgtgaacggcaggcggcggaacagccagcgctcggtcgcgctgacctcgcggtccggcttgggcatgatccacggcggggtgcgctggtacaggtccagctgcgccacctggggcgcgatctgcggcacgaactggatcgcgctggcgccggtgccgatcaccgccacgcgcttgccagcgagcgcataggcgtggttccagtgctgcgagtggaagcactcaccctcgaacgagtccagccccgggatattggggtaggaaggccggctcagcccgcccatgccggagaccagcacgcgcgcgcgcaccaccttgccgtctgccatctccaggcgccacacctgcgcggcctcgtcccaggcggcgtggcgtagttcatggtgcagccgcaggtgcgggcgcaggccgaagcggtcggtgcagccttccaggtaggcgcggatctccggctgggtcgagaacatgcgcgaccagtcggggttcggcgcgaatgaaaaggaatacaggtgcgactgcacatcgcaggcgcagcccgggtagtggttgtcgcgccaggtgccgccgacggagccggctttctcgaagatcaggaagttgcgctcgccgcgttcgcgcagccgtatcgccatgccgaggccggcaaagccactgccgatgatggcaatgtctgtgtgctcaagggcaggggatgcctgctgcggcagctccgcgggtgcattcatgggcgctcctcaccgttcacagtgtttattgtgacattgatggatgtcatcgtaggaagcgcagggcaggtggtcaatgccgtgagttgaaggatggttctaatttttggggatttccagcggcgtttcgcgcacataaaacaaggcgatgccaccccgcaggcgcttgcgccatgggattcggtcgtgcgtttgaaaccgggagatttttttcaggcttcgcagatcacgaaggcgtggccgcaacattcaggcgctaggcggcctggcccttgcggcgccagccgtgcggcgtttcaccggtccagcgcttgaaggcgtgggtgaaggcactctgctcggaatagccgagccgcatcgcgcactgcgccaggctgatgccgggatcggcaagatactgctccgccagcgcgcgccgcacgttatccacaagctgtgaataactgatgccctgcgcctgcagccgccgctgcagggtgcgcacgggcaggctcaggtgcgcggccacgtcggcaatcggcagttcgccctgcggcagccgcccgctgatataggcacgcgcctgcgccaaggcgtcggccccggccggcgcgatctgctgcagctgggtatcggcgatgcgcgtcatctgcgcctgcatgcccgcgtcggcctgcagcgacggcaggtccagcaaggcccgttcgatatgcatggcatggcgcgcggcgttgaagaccacggggcagccgaacacctcggcatgcaggcgggtatcagcgggcgcgggatgcgggaattccacctgggtggccacgtgctgctcaccgatcagccagcgcgcgaacaccacccaggttgccatgtgcagctcatgcgcatggcgcgacagcgggccatgccgggcttcccaggtcatgcaggcggcatgcggcgtttcgatcaggcgggtgccgccgatatcgttggccagcacctcatagcggatgccttgcaggatggcgtcgcgcacggtgggcgtggtcagcaccacgtagcccatctcggcatagtggcgcggcgcgaaggcggcgccggcgcgcaggccgacatcgggatcgccggtgacctgctccagccagtcgagcagggccaggtaggcggcaccgggaatgcgcgtggcggtctgcgcaccggtggcatgcagcagctcgggcggcacgccgacggcgcgcagctgttcggccggggcaatgccctggcgcgcgccgtggtcgagcacggcgcggaggtaggcgagcgagacggtgcccaatgcggtgcccgcttgcgtaccactggcaccgccgtcgggctggttggcgcgtggcatcaattcacctgtcgtgcgggatcaagaccgggcaccgatctttatccatactccgggtagcgtcaatgcgggcctgcccccgcctgaatacaagagaccgacgcaaggagacaacatggcccccaatcatccacaccgccgtgcggatgccgatgccgaggcgctgcacgcgctgacgcggcgcggcttcctgaaagtcggcctcggcttctcggccgcgctggcctgtaccgcgctggtgccgtcgctggccggctgctcatcggcccatcccgcgccgcaggccggcatgacctggctgcgaccggaagacgtggcgatgttgcgcgcgctgctgccggccatcgtcaccgagctggccgaagcgccgccgccgcggcgcgcggccctggagcaggacgcgctgcgcaatatcgacgcgacctgcgccgcgatgggcgcgggcgcgcaagccgagctgcgcaagctgttcggactgcttgccagcatgccgctgcgctgggcgctgaccggcatccgccaggactggagcgcggccacgcccacgcaggtgcaggccttcctggcgcgctggcgcgccagccgcctggccacgctcaatgccggcgcggtggtgctggtcaagctcatcagcgtgagctactacgtgttgccggccgcatgggcgggcagcggctatcccggcccgaacgcggccgtctacaaggcgctgcacgcctgatccccgacatggccatcgacaatctctacgacgccggcatcgccgccggctggaaggtactggacgctgccaccttcaccaccacgcgcacgctcgatgccgacgtcgtcatcgtcggcagcggcgcgggcggcggcatcagcgccgaggcgctcagccgcgcgggcctgcgcgtggtgctgctggaagagggagcgctgcgcacctcggacagcttccgcgacatggacgagaaccgcgcctatcgcgagctgtaccaggaggccgcggcccgcaccacggccgacggcgccatcgccatcctgcagggccgctccgtcggcggcagcaccacggtcaactggtcgtcgagcttccgcacgccgccgcagacgctggcgcactgggccacgcatcacgccgtcaccggccacagcgaggccgacatggcgccgtggttcaggaaagtggaagagcgcctgggcatcgcgccatgggcgatggcgcccaatcccaacaacgacgtgctcaagcgcggctgcgagacgctgggctgggaatggcacgtgatcccgcgcaatgtgaagggctgctggaactccggctattgcgggctgggctgcccggtcaatgccaagcagtcgatgctggtatcgaccatccccgcggcactggccagcggtgcgacgctggtgcaccgcgtgcgtgtgcgcacgctggaccatgacggcaagcgcgtgcagtcggtcaccggcgaggcgctgggcgccgatggctacacgcccaccggcgtcggcgtgatcgtgcgggccaggcacttcatcgccgccggcggcgccatcaacacgccggcgctgctgctgcgctcgcgcgtgccggacccgcatgagcggctgggactacgcacgtttatccatccggtgaatatcagcatcgcaaaaatgccggagcgcattgatccttattatggcgcaccgcagtcgatcgcttccgaccacttccagtggaaggacggtgcgaccgggccgatgggctacaagctggaggtgccgccgctgttccccggcatcagcgcgggcgtggtcaacggcgtgggcgaggcactgcgccgcgacatggcgcaactgccccataccaacgccatgctggcattgctgcgcgacggcttcgtgccagagagcacgggcgggcgcgtgcggctggcacccgacggcagcccgctgctggactatgagatgagcgactacgcctgggacggcgtgcggcgcgcgtggctgagcatggcgcaggcgcagtttgccgccggcgcggagcgcgtgcggcccgcccacctggacgccgccgagtaccgcagctggcccgaggcgcgcgacgccatcgcgcaactgccgctcaagcctttccgcaccgcgctgttcaccgcgcacctgatgggcggctgcggcatgagcgacgatgcgcgcggcggcgtggtggacagccatggcaaccaccaccagctggccaacctgtcggtgttcgacggctcggtgttcccgaccagcgtgggggccaatccccaattgtcggtgttcgcgctgacggcgcagaatgcgcacgcgctggcacggagcctcacgtcatgaggtattggccgcgcaagcctgcaatgtcctgcattgcaggcatccggcatgcctgcttcatgcaggttgccggcgacattgttgtgcgattccccacaccagtggcgcaattagaatgcccactccaattcaggtcttgtgaaacgctcgaagcggtggataggcttcgtacagctgtttcaagcatccgtatgccgtcagagcagggagcggaacagcgtagcaaattgctaaggggtttaaggcagcaacgaagagagacgcccccatgaagaccggcaaaagctcggcaggagacaccaaggcccggattctcgacgccacggaaaagttgtttaccgaggtcggctatgaagccacctcgctcaggcaggtcacgtcgcgcgccatcgtcaacctggccgccgtgaactaccacttccgcagcaaagatatcatgatgcacgccgtgctgagccggcggctggatccgctcaacgcgcggcgcctggcgctgctcgatgcgtgcgaagcgcgctggcccggcaacagcatccgctgcgagcacgtgatgggtgcgctgttcgtgcccgcgctgcaaatggcacgcgacccgtcggtgggcgggccgtcgttcctgcggctgctcgggcgcgtgtattcggatacctcgccctttatccagcaatacctgctggagcactacgccccggtgtacgggcgcttcttcgacgccttctcgcgcgccattccggcgctgccgcggcatgagctcggctggcgcctgcagtttgcgctcaaggcgctggccggcgtgctggccggcgaagagctcaccaacctgctgcccgcgttcacgcagggccggcagatgagcgatgcgcacgtgctggcccagctcaccgccatggtggaagccgtgctgaacgtggcgcaacccagtgcggacgacttctcggccctgcagtcggtgttcgagcttggcgagcagcagcaggccagggagcgcgccagcaggctggccgcggcgcggtctgccgatgaactgagtgccagttgcgccgcgatggcggcaaccatgggcgatgcggccagccagaccgccgccgccctcggcaaggcccgcatcagcgcacgcaccgtgcgcaatgagggcaccaaacgctcagccgtgaccagcatgccggtccgcgcgcgcgagcaaaccgtgagcttccccagcaacccgctggatgactggatgcgaatgcgcaccaggacatagcggcgcgcgccgcacccggttaccgccgggccggcgccaccgccctcacgcaaaaactgaaccgtcgatccatccagcgaggccacgcacaggccccgcggaccccgtgcgccttatcggattttccaagggcgcggcggtggccccgttcgccctgcgctgcccgcgctccgcctcctggcggacatcttgaggaggaagctgccatgtcgatccaaccgctttaccttgccgccgtcgccggtgccgtcatcggactgctggctgcgccactggccatgcccccggtggccatggcccagacggccacaaccaccgccgccgcgggcacgggctatgacggccagacatccgcacagcaagccgcactgttctcgcgccaggtcgccagcggcgaactcgcgcggctgtccgatgagcaggtgctggccgtgttccaggcgctgcagccggacgcgctgctgaaatgggcccgtgccgagatgaaccgctatcccgagtacgagtactggatgtcgcgccaggaacggctcaacaaccagtggcaggaccagcccgccaggatgcagatccgctaccgccaccagccgcgccagctctatgccaagtggctgcccggcggcgcgcagtcgggacaggaaatcatctacgacgagacccgccgcaaggacgagatgtacggccacctgggcggcgtgctgggcttcacctcgatgtggattgcgctggacggcacgctggcgcgctcgcagtccaaccacaccgtgcgcgacctgggcttccagttcgtgctgtcgatgctggagcgcgacgccaggtccctgcgtgccgccggcctgtccgagaagtacagcaaggccgagatcgtgcaggagcagggcgtgcgcatggtggcgctgacctgggacctgccggccggcgcgccgcagtactacgccaagaaggtgcagctgatgctggacctgaagcatccgtatatccgcgtggaaaccgcctgggatgccgacggcaacatggtcgagaagatcgtgttcgacaagctggtgcgcaagaccttcgaggcctcggcgttcgatccggccaatcctgactatcgcttctgagatgcggcaaagcggcgcgcaccgtgcgtttgaatcggtggctgcgccgctttgccgcgcagtccgtgcaacacccgcaatccaccgccacgtgcggcatgcacgccaggcgcgcctgtttggaacggccgctctattgacgcaaaaacacgcgagcggcgagagtcgccgcacccgggagggatccggccgcagagccggacaccagatccagaaccaggggtcgccaagaaaaaatcaggagacaggcaatgaccatgtcgatgcttcgacgcagcactttggttttgacaggggtgagccttgccgcggcgctggccggctgcggtggcggcggcggcgatgaagaggcgccgcgcgccggcacgcaggcaccgcaatgcgctgacacgggcacgtgccccgcgcaggggccggtcaccatcggcggcccgccggggtcgttgtgcccggcggcactggactacagcaccaccttcaccggcggctccggcgcgggcgaactggtgaagctgcgcttcgacaccgcggcccgcacctaccagctggagatcatcgagtcgccggtgcccaagcaacccggcagcgtcagcccgacgcgcgcgggcgtgactttcaccggcaccttcgccaacctgacctcgctgccgaccgccgagcagaaccgctgcgcagtcgcgctgcagacggccaccgcatccgacggcacctcgcaggccaatatcgacagcgccaggccgccggtgatcttcctgggcaatggcgttgccggcggcggcatccccggtgccaccatctcctatccgggcgtgctcgggctgggtgcgatcccggccaccacgttcccgttctacccggtgctggcattcgcacagaccgagaccgacttcaccagggtggccggcagctacaacctgctgggctaccaccaggtgccgtccggcggctcgctgacttcgtcgagccacttcacgcccgcgaccgcgcagaccaccgagacgctgaacgccgacggcagctgcacggccgcggccggcagctgcctcagcaccggcaacagctggaagctgcgcagcgccgatggcgccttcgaaagcagcaatgccgatggcagccgccgttacccgtcgttccagagtgcggccatcaccagcaacaacgccagccgcgccaaggggctgatggtggtgggcaagctcaacggcgcactggtgccgctgctggtgcgcaccggctacgcgcagatctcgctgctgccactgacggtcaatgtcgacgacgaatcgggcctggcactgatggcgccggcgaaggcactggccagcggccagcttgacggcggctatatcggctcgggcagcgactttgtctacaccgcctcgctggtcaagggcacgcgcgtggagctgctggacccgatgacgatgaaccagaccggtgccttccagctcgacttcacgcagaacgcgccgggaatgatcgccaccaccgacaacagcggcaccaccggtgcgctgattgccagcgggcgcgtgttcagccacctgtccggcaccggcagcgccagcccgaccttccgcgtcggcgtgctggcagcaccctgagtccaccaagaacacacaaaaccgaggagaccacgccatgcaaccccttcgactgatcctgccgcgggcctcgcgcccatccacggtgccggcgcgtgcgctggccgtggccgccaccgccatgctcgccgcctgcggtggcggcggcggcgacgacgcgccgtccacgccggccgcggtgcagacgcggctgtgcccggcagcgctcgactactccaccacctttaccggcggcaccggctccggcgagctggtgaaggtgcagatcgacaccaccaaaaagacctggcaggtgaccttcgtggactcgtcggtgccgcgccagaccggcaccgtgcagcccacgcgcagcgatcccaccaacgggcagaacgtgatgcgcggcacgctgaaggcggagacggggttgccgaccgagaagctcaaccagtgcgcgttcgagctgagcggcgccagcctcgatccgaaccgtccggccaagctcttcgtcggcgaaggcgtggtgggcggcaccatcccgggcgcgcgcatccagttcaacggcgtgctgggcgccggcgcggtgccggacaccaccttcccgtatttccagttcatcggcttcgcgcagaccgagaccgacctgtcgaagattgccggccagtacaacggcacgggcttccacgaggtgccgtccaagcagttccagctggtggcgcaggactaccgcatggcgctggctgccgatggttccttcaccgtctgcgacaacgccaccaacacgtgcgagcgcaagggcaacaacttcgtgccgcaggcgagcggcgcgctgctgtcgaccaactacaaggccgagagccagccgcccacgctgggcggcacgctgggcaaggcctacctgatcgtgggcaagctgcgcggccagctggtgccggtcatgatccgcgtgggctatgccaatgactcgctcgccaacggcccgcttggtgccgacgacgagatcggcatcggcatgatggcgccggcggtagcgcttactgaaggcacggtcaacggcgaatacgtcggcgtggacagcaacttcaactaccgcgtgacggcactggtcggcgccgcggccaccatgatggatccgttccggccgcatgatgcctcgctcgccatcccgtaccggctggatttctcgcagcaggtgccgggcgtggtccgcacgtcgcggcgcgatgcgcctgcaggctcggcgccgaccggcaagctgatgttcaccggcggcgtgttcggcttcctggaacagcgcgacagcggcccgtacttcaccgtcggcgcattcgtgcagtaagcacgctgccaggcccgggccattgcagcccgggccactgcgccacgatccgaccatacagagacatccactgccggggacacaagatgaaaaccatacgcctcacgctcacactgatgctggccgcgctggccagcttcgccctgcctgcccacgcccagaagaagggcgacaacgtggtatccgcgggctggttccatatccagacccacggccagagcgctccgctgactaccaccttgctcgacgtgccgatcaactacccgctcgggctgccgtccagcttcaccgcaccgggcagcagcatctcgtcatccaacgccaatacgctggggctgaccttcagccacttcgtctccgaccatatcgcgatcaccgcggtgggcggcatcccgccggagttcaagctctacggccacggcgaactgatcccgcccggcccggccggagcgctcgggcgccagagcctgggcgatccgtcgctgaaccccatcgtcaccaaggcacgccagtggagcccggcggcgatggtgcagtaccacttcctggatccgggcacgcgcttccgcccgttcctggggttgggggtgtcgtacaacttttttaccaacatcgaggtcaatccggcgtttgcgagctcggtcaacaacaacctcggcgcgatcctggcggcgggggcgggcatcccaggtccgacttcggtgagtgcggatgcgtcgtcgtcatgggcgcccgtgttcaatatcggcggcacctacaacttcgacgagcattgggggctgacggcggcggtgacttatatcccgctgaagacgacgtcgacgatgacgatcaaggcggccgacgggaccgtgctgtcgacctcgaagaccaagctggagccgaatccgctggtgttcttcctggcggcttcgtacaagttctgacgctgaaagaaaaaaacgacgcgcctgagcgcgtcgttttttattgctgcaacggcaagcggcaacctttactgcgtcaccgtccccggttgcgcaggcgtcgcctgctgcgccaccggactgttctcctgcaagccaccgcccagcgaccggtacaggtcgatcgcgttgttcagccgcagctgccgcgcctggatcagcgcctgctcggcggtgaacagctggcgctgcgcatcgagttcgtccaggtagctggccacgccgctgcggaaccgcaggcgcgccagctcgtagcgcgcggcttcggcgttgcgcacctcttcctggccggagacctggtcttccagcgtgccgcgtgctaccagcgcatccgccacttccgcgaaggccgtctggatggtcttctcgtagttggcgatctggatgttcttgcgcacgttggccaggtccaggttggacttgttgcggccatagtcgaagatcggcagcgtcagttgcggcgcgaacgaccacgccttggtgccggcatcgaacaggttcgagaacgtcgggctgatggtgccaacgctggtggtcagcgtgatgcgcgggaagaacgccgcgcgtgccgcgccgatattcgcgttggccgacagcaactgctgttcggcctggcggatgtccgggcgttgctccagcaggtccgacggcaagcccgcggggatatcgctgatgatgcgttcgtccgacagccgcatcggctcaggcaggttcccgatgctgccgatgggcttgcccaccagcacttcaagcgcgttctgcgcctgcgcgcgctggcgtgctagctgcgcggcggcgacacgcgcctgggccaccagcgactcgttgtcgcgcaggtccagcgcggatgtggcgccgacgtcgaagcgctgcttggcgagcccataggtgctctcgcgcgccttgagcgtgtcccgcgcaatttcgtactgctcggcgaaggaacgctcggacagataggccttggccacttccgacaccagcgagatatacgccgaacgatgcgcctcttcggtggagaagtactgcgccagcgccgcgttcgacaggctgcgcacgcggccgaagaagtcgagctcgtaggacgagatgcccaggttggcctggtagacctgcgtcaccccgggctggccgagcacggtcgaggtcccggcggcgttggtgctggcacgggtgtaagcagcgttcgcgttcaccgtgggcagcaggtcggcgcgctgcacctggtacagcgcgcgcgcttcttcgatgcgcagcgcggcggtgcgcaggtcgcggttgttgtccagcgaggtcgcgatcagcgactgcaggcgcgggtcgcggaagaactcgcgccagccgatgtcgacagcgcggcgggtctcgccgctcttcgcctcggcggtggcgtagccctcgggcgccaccgggaagctgtctgccaccggcggggcagggcggtcatagtggggcgcgagcgtgcaccccgtcagaacgccggccaccagcagcagtgtggtcagagtcttggtcatgttcagatttcctctttcggctcgtgccacttctggtccagcatgcgctggcgtttgctgcccttgaagcgcttgcgcaccaccacgaagaagaccggcaccaggaagatcgccagcaccgtggcggtgatcatcccgccaatcacgccggtaccgatggcgcgctggctggccgaacccgcaccggtggcgatcgccagcggcagcacgcccaggatgaacgccatcgacgtcatcaggatcgggcggaaacgcaggtgcaccgcttccagcgtggcttcgatcaggcccttgccctgcgcctgcaggtccttggcgaattccacgatcaggatggcgttcttcgccgacaagccgatcgtggcgatcaggcccaccttgaagtacacgtcgttgggcatgccgcgcagcgtcacgccgagcagcgcgccgagcacgcccagcggcaccaccagcagcaccgagaacgggatcgaccagctttcatacagcgcggccaggcacaggaacacgatgatcagcgacagcgtgtacaggatcggttcctgcgagccggccaggcgttcttcataagactggccggaccactcgaagccgaagcccggcggcagcttggcgaagttctcttccatcacgcgcatggcttcaccggtactgcggcccggcgcggcctggcccgccagcttcaccgccggcatgccgttgtagcgctccaggcgcggcgagcccattacccacttggaggtcgcgaacgcggcaaacgccaccatgtcgccgttgttgttgcgcacgcgcagcttggtcaggtcgtccggcaggcggcggtctgagccttctgcctgcacgatcaccttgcgcacccggccttcatagatgaagtcgttgacgtagttggagccgaacgcaatcgacagcgtcgagttgatgctcgccaccgtgacgccgagcgccttggccttctcgcggtcgatgtcgatctgcagctgcggcgcatcttcctggccttccgggcgtacgcccatcagcaccgggctctgcgcggccataccgagcatcatgttgcgcgcttccatcagcttggcgtgaccctggccggtgcggtcctgcaggcggaagtcaaagcccgaggagttgcccagctcggaaatcgccggcgggttgagcgggaagatgatcgcgtccttgatgaacgagagcgcgccgaaggcacggccgaccagggcctgcgcggtctcgccgtcgccggtgcgctccttccagtccttcaggcgcacgaacgcgataccgccgttctggccgcggccgaagaaggagaagcccgccaccgtgatcatctggtcaaccaccttgctttccttctgcaggtagtagtcctcgatctgcttgagcacgccgatggtacggtcctgggtggcgccattgggcagctgcaccacggtgatcatgtagccctggtcctcatcgggcaggaacgacgacggcaggcgcttgaacagcaccaccacgccgacgatgatgaccgcgtagatgatcaggtagcggccggagcgcttgaggatgcgcgcgaccacgccctggtagctggtggccgaacgcgcgaaggtgcggttgaaccagccgaagaagcccgtcttctcatggtgatggccggcttccacgggcttgagcagcgtcgcgcacagtgccggggtcagcgtcagcgccagcagcgccgagaatgccatcgacgagatcagcgacagcgagaactggcggtagatgttgcccaccgagcccgagaagaatgccatcgggatgaacaccgcggtcagcaccagcgtgatgccgacgatcgcgccggtgatctggcccatggccttgcgcgtggcctcacgtggcgagagtccttcctcgctcataatccgctcgacgttctcgaccaccacgatggcatcgtccaccaggataccgatggccagcaccatgccgaacatggtcagcacgttgatcgagaagccgaacgccagcagcgcgccgaaggtgcccagcagcgcgatcggcaccaccagcgtcgggatcagcgtggcgcggaagttctgcaggaacaggtacatcaccaggaacaccagcaccacggcttcgagcagggtcttgatcacttcctcgatcgagatcttgacgaaggccgaggtgtcgtaaggcaccgagtactggtagtccgccgggaagttcttggacagctcttccatcttggcgcgcaccgcggtggccgtggccagcgcgttgccggtcggggccagcttgatggcgatggccgccgacggcttgccgttggtgcgggccagcgtcgagtagtcggcaccgcccagctccacccggcccacgtccttgatgcgcaccgaagacccgtccgggttggtgcgcagcaggatgttgccgaactgctcaggcgtggtcaggcggctttcggtggtgacggtggcgttgagctcggtgcccttgggcgagggcgtgccgcccagctcgcccacggcgacctggatgttctgctcgcccaccgcggcggtgacgtcggtcggggtcaggttgtagccggtcagcttggccgggtccagccagatccgcatggcgtactcggtgccgaacaggtcggcctggcccacgcccggcacccggcggatcgagtcgatcacctgcgccgagacatagttgccgagctggatcgcgtcggccgtgccggacttggacgacacggtcaggaacatcatgtagttgttcccggccttgtccacgcgcacgccctgctggcgcacttcagccggcaggcgcgcttccacgcgcttgaggcggttctgcacttcgaccgagttcaggtcgacgttcgaacccggcgcgaaggcgatggtgatgctcgccaggccggacgactcgctggtggagttgtagtagagcaggttaggggcgccgttgagctcctgctcgatcaccgaggtgacggaatcctccagcgtcttggccgacgcacccgggtaggtggcggtgaccgagatcgtcggcggggcgatgttcggatattgcgcgatcggcaactgcaggatcgacaatatgccgcccagcacgatgatcagcgcgagcacccacgcgaacaccggccggtcgataaaaaacttggccataaactggctccctcttggtctagcggtctagccgtatttgccgtattggtggtacggcagggttcagccttgcttggcgtcagacttggcttgctgcgggccctcggccttgggggccgaggccggcgccgccggggcggaggccgtcgccgcggccggtgccgaggccccggccggcttgaacggtaccgccctggccggcgcaccgaccttgaccttctgcaggccttcgacgatcaccttctcgccgcccttcaggccttcggtcacgacccagcggtcgccaatggcctgcggcgccttgaccggcaccgccgcgacattgccgtccgtgcccaccaccatcacgctggcaccctgcgcgccgcggatcagcgcccgctgcggcacggtcagtgcgttctcgtccacgccctgctcgatcttcacgcgcacgaaggtgcccgagagcagctcgcgcttcgggttcgggaactgcgcgcgcagcgtgatcgcgccggtggtcgggtcgaccgtcatgtccgagaacagcagcttgccggtgtgctcgtactcgcggccgtcttccacgaacaggcgcacgttggcgccgccgttgacgcccttgaccacgccggactcgatggcgcggcgcaggcgcgtgacttccgaagccggctgggtgaaggtgacccacatcgggtcgacctgctccaccagcgccagcttggtcgcctcgcccttgcccaccagcgcgccctcggtcaccagcgcacggccggcgcggccgctgatcggcgcggtcacggtggtgtagcccaggttgatctgggcggtgcgcaccgccgccttggccgaggccacgtcggcgttggcctggccggcggaggccacggcgtcgtcgtactcctgcttgctgaccgcgttgacggccaccaggggcttgtagcgatcggccttcaggcgcgccgacacggcgttggcctcggcgcgctgcagcgcggcctgggccgaagccagcgtggcctggtagggtgccgggtcgatgcggaacatcacctggccggccttcacttcgccgccttcggtgtagttgcgcgacagcacgatgccttcgacgcgagcacgcacttcggccgtgcgtatgccttccaggcggcccggcagttcattgacgacggcgaccggcgacggcgtcacggtcaccacacccacttccggcggcggcggggcgccgccttcggccttcttgtcgccgcaggcaacaagcgccacggcagacagtgccgctagtgcataggcagcaacgcaacggatacgttgggacttcctcatcgataaccccatgatggcaatttgagatctgccgcatcgtcccgacctgtcatccgacaaacggatacgacacagcccgccgcacggtttgcggcggacaaaagcgtgatgctagccacaaatcgcggcgtcgcagtgtcaaatgcgacgaacggcggcttttatgtaacgactggattcatgaccggctggcctgcggcagggattgccaactgtgctgggtatgtcacagaaggcggctggccgaatgccggacaagcgcgtattatatatacattcaagcatgtatgttaagttgatgttgcagaagggactttcggcgcacaacctgcgccgcagggccgcggcaatacggatcccgcccccggtcaaacccaaccggccggtccaaattgctccccacccgttcggaatcacggcgcaaatcgccggctcgggttaggatgcgcgccgtcgtatcggctcgcaggctgcaagcacattggcatgtgacgacaacgacccgccggcgcgtgcgccggccgtgcggctgccacagcggggccgcacccagggagaaccaacaaggctggccatgacggatccattgcgtcatgccgccggcaccagagacaaaaatggtcagacgtaccaaggaagaggcgcttgaaacgcgccaccggattctcgacgcggccgaagccgtgttccacgcccgcggcgtggcacgcccgtcgctggcggacatcgccgaggcggcgggtgtcacgcgcggcgcgatctactggcacttcaagaacaagagcgatgtgttcgccgccatgtgcgaccgcgtcaacctgcccgtggaagcgctgtgcgaccccgagcggctcgcgcgccaggaagacccgctgggcggcatccgcgacatctgcgcctatgtgatgcgccagaccgtggtcaacccgcgctggcgccgggtgttcgagatcatcttccacaagtgcgagatggtgcaggacaacggcgccatcttcgagcgccagcgccagtcgcaccaggaaggcctggtcaagatgcgcgagcacctgcgcctggccctggagcgcggccagctgcccgccgacctggacctggacctggccgtcaatgccttccatgccgccatcggcggggtgctggcgcactggctgttctcgccccaggacttcgacctcgacgccaacgccgagcgcatgtccgacgccttcatcgataccctgaagttctcgccggcgctgcgccacggctacgtgccgcgcccgatggcggcgctggaccgggaactgtccacgctgtgccagcaggcctgcccgaacgcccagccgggcgggctcgataccggcgacctggtcccctgagcggcgcgcttatccgcgcttatccgcgcatggcctcgcgccagcgcgccaggaatgcgcgcttgcgcatcgcgtcctgcgcggccagcaggcccgggccgacgctgatcggcttgagcgcgtagcccagccgctccgacaatgccgccgcggtgtgcacgctgtcggtatcggtgcggatggtgtagagctgcgaggtggacttggccagcagcgcctggccctcgcgcgagagcaggtagtccagccacagccgcgccgcattgggccgcggcgcgcgccgggcaataaaggctactcgcgacatcaccagcgtgtagtcgcgcggggcgatcacgtcgatggccgcgccacgctccatcagcgacagcgcgtacgaacccagcaggttgtagcccatcaccagctcgccgctggcgatgcgctcgatcatctcggcggtggacgccgacagctgcaccccggcgcgccccagcgcctgcgccagataccagaactcactgcccatgcgcgcgtcctgctgcgccagcaggtagcccacgcccgagcgctccacgtcatacgtcaccaccttgccatgccagcgcggcgcgtgctcctgcagcagccgcgccagcccgctgcggctgcgcggcgggcgcatgccggccaggtggtggcggttgtagacgatcaccgcgggctcgaaggtggtgccccaggcctcgtcgcgccacaccgcccagccgggcaggccggcgcgctcgggcgaggcgtagcgctgcgcatggccgtcgttgaccagcttgatctgcaggtccatcgccgtgctccacagcacgtcggcgaaggccgcatcgggcgcgggccgcttgccgcccagcgccgcggtctcggccaggaagcgctggttcagctcgatcgtgttgagatcctggtagtgcacgcggatgcccgggtagcgcgcctcgaacgcggcgatcagcggctgcgccactttcaggtcggtcgatgcatagaccgtgaccatgccttcgcgcatggcgccggcgatggtggcgtcatacccggacggataccccggcggcggcgccgggggcctagactgggcatgaaggggccacgcggccggcaaggtggcgccggccagcagcgatgcgcccagcaggcggcggcgctgccccgaggcaggcggctcgcaagcgcacggcagggacggcgggggtggacgcgtgggcacggtggtcggaaacggaagaactgcctgtggaagggagcgggcgcacggacaacacgcgccgggaccagcggggcggggttattataggcgcccgcggcgggcgcgctccatcggtgcagccccctgttctccggacggtttccgccgccgcaaccgaaacatggaccaaaccggcagaggaggagaccggcatgcgcatcctgctggtggaggatgaaatcgaactggcacgctgggtcgcccgcgcgctggagcagggcggctttgtgatcgagcatgtcgccgacgggctgcaggccgaggcccgcctgcaggccgaggaatacgacgcggtgctgctcgacctgcgcctgcccggcaaggacgggctggccgtgctcaagtccatgcgcgcgcgcgacgaccgcaccccggtgctgatcctgaccgcgcaggacacgctggacgaacgcgtgcgcggcctgaacctgggcgccgacgactacctgcccaagccctttgccattgccgagctggaagcgcggctgctggcgctgatccgccgcagccgcgggcgcgcgcatccgcgcctgcagtgcggcacgctggtgttcgacggcgagacccgcagcttcacgctggacggcgccccgctggcgctgaccccgcgcgaatcgaccctgctgggcgcgctgctggcacgcagcggccagccgctgaccaaggcgcagctgctcgacaaggtgttctcgctcgacgccgatgtctcgcccgacgcgatcgaggtgctggtctaccggctgcgcaagaagctggccgggcacggcgtcaccatcgtcaccctgcgcggcttcggctacctgctggagcccgaggccggacgctgaagatggcgcggcgccatcgcgtcccgtcctggcgccgcggcagcctgcgccggcaactgctgttgctgctggtgccggcgctggcggcgatgatggcgatcgacacctggctcacctacggcaccctgcgcgacgccgccaacacggcttatgaccgctcgctctatggctcgatccgcgccatcgacagtgccatcggcatggctggcgacaacgtccagctgaccctgcccgatgccgccatggagatgttcgagacggcggcgcagacccatgtgttctaccgcgtgtcgaccgagcgcgccggccaggtcgagaccgtcaccggctacgacgacctgccgcttcctgccggcaccctcgtcaacaaccagccgcgcttctacgacgccgaatacctgggcgagtccgtgcgcatcgccgcgatggcgcggccggtataccgcccggacgcgcgcatgcgcgtgatcatccaggtggccgagaccgccgagccgcgcaccacgctgatcggcacggtctggcgcagcgcgctggcgcgcgacctgctgctgatcctgctaagcgccggcatcctggtgggcggcgtcacctacgtgctgcgcccgctggcgcgcgtgcgcgacgacgtggaagcgcgctcgccggatgacctgacaccgctaacgttcgagcgcgtgcccgccgaggtgcgcccgctggtcgacgcggtcaacctgcacgtgtcgcgctccgcggcaatggcgcagtcgcaggcccagttcatcgccgacgccgcgcaccagctgcgcacgccgctggccatcctgaagacccaggccgaatacgcccagcgccagctgcgcgcccctgaccccgagaccgcgcgccaggccgccggcgaagccgtgggcggcatcgtcacccagctggaacaggccgcgcgcctgaccaaccagctgctggcgctggcgcgggtacgccagcaccacggcgaagccgcccaggaagccgatggcatcgacatcatcgacgccgtcaccgtggccgagcaggtggcgctggactacctgccgctggcgcgcggcaagcagcaggacttcggctgggagccggtgccggggctgaagctgccggtgcgcgccgaccccgcgctgctgcgcgaggcgctggccaacctggtccacaacgcgatccagtactcgccacgcggcagccgcatcacgctgtcggccacgcgcgccgaccagaccgcgtgcctggtggtggaagacgatgggccgggcattccggccgaagagcgcgaaaaggtcttcgcgcgcttctaccggcgcgttggcaatgcggagccgggctccgggctggggctggccatctcgcgcgagatggcggcgcggtttggcggcacggtggagcttggcgacggcttgcagggcaccggcgtgcgcgcggtgctgaagctgcccatcggcgaataacccctaaccatataactcctccgccaccgtcggatgcaactgcaccgtggtctgcaggtgcgattcgcgcacgcccagccgcaatgccaccgccagcgtctgcacgatctcgggcgcggcgtcgtccatcaggtgcgcaccgagcacgcgcccgctgcgcgcgttcagcaccagcttgaacatcgactggtgggagttgccggcaaagcggttttccagcgagacaaagcgcttgaccacggtgcggatgcgctcgggcctgccggcggctgcgatcgcctgggcctcggtcaggcccacggcgccgatggcgggctcgcagaacaccgcggtcggcacgaagtcgaaatcggcgcgttcgccgcgccggccgtacaggcggtcggccagccagcggccctgcgcggtggccaccggggtcaggtgcaggccgtcgatggcgtcgccgagcgcgtagatgccgcgcacgttgctgcggaactggcggtccacgcggatgccgcccttgtcgccaaagtccacgccaaccgcctccagcccgaagccctgcacgttggaaatgcgcccgatcgccgccagcgcggcctgcgcgcgcacagcctcggtctggccggggcggtcggtggggcggtagcacacttcaaccgcgccgttggcctggctcagcaggtgcaccctggcgttcaggtgcaggcgcacgccgcgcgcggtcagtgcctcggccagcgaccgggagatgtcgtggtcgaagtggggcagcagccggtcgccggcaacgatcaggtctaccttgacgccgtagcgcgacaggatcgaggcctgctccacgccgatgtagccgccgccgatgaccgcaatcgaacccggcacggtctgccaggtgaagacatcgtctgaactggcggccagttcgccgcccgggacttcgagcgcgcgcgggcgcgcgccggtggcgatcaggatgcggcgcgcgtgaatggtctcgtcgccgacgcgcacttcgtccttgccggtaaccagcgcatcgccgcgcaggatttccacgccggattcgtgcaggcgctgggtgtagcccgcgttcagccgcgcaacctcggcattgacgcgcacgattgcgtcgcgccagtcctcacgcccaccggtatgcgacaggcagcccgacaggatggccgaccagccggcgccgtaggacagcatcttcttgggcacgcagccgcggttgacgcaggtgccgccgatggcatcgcgctcgaccaggatcacgcgtgcgccgtgcgcggcggcacgccgcgcgcaggccacgccgcccgagccgccgccgatcaccaccaggtctgccttgcgcaccttgtcattgcgccgcgtgcggccgtcgcgcacgcgcggcacctgctccaccggcggcgccgcgctgacctcgcgggcgcgccgcggttccctggccccggcgggggttgtctggcgcttagtcatccatgcctcctgtcgcggcacacgggccgcatcgacaacaatcaggccagcgccagcaaacaagaaactaggcagcgggccgcagttcggtattcaggatcgacggccactcgcgcaggaaagtttccccgtcgcggcggcccagttcgtaggcgtgagtcatggcatcgggccgggtgtagtcccagctcgagatcggcacgcgctgcgagggctgcaggtacaggcggcgctggccgccttgctcaagcacgaaacggcgcgggcgcggatacagccttgtcaccagcaccagcacattgcccggggtggcatcgagcgcgtccacgggcacgttgtcgaccagcccgccgtccagcaccgggcggccgccgcggcgcagcaccggcgtaaacggcggcgtggaggccgactgcagcagcaggtcggccagctgctcgggcgaatcgcagtcctgcgcgcgcacgaactccggccggaagcccagcttgcgccccagccgcgggtgcagcgtcttgagcacatgcttgtcgatgttgtacgccagcagccccgctgccaccgccaggcgcgggccgctccagcgcgggatatgggccacgccgatgcggatctccggcgcctgctgcaggtgcgagaggcgcccgtcggcgaagatcgtcagcagcgcggtgcggtagatgccgtaatgcgggaacacgcgctcattgcgcagcaggttgccccagtaggcattgcggcggttgttggacaggacctcgcggtagtagtccatggtctgatgcgagtcgtgcgcatagaccatgcacgccgtcgccgcgccggccgagatcgcggcgatcacgcgcgggcgcaactgcagttccggcgcgaccgcgtcccaccagcccgcctgccaccagcagcggttgccaccgccggcaaagacgacctggtcgaagggatgggcgtggccggaagtcatgggcgctggcgttgcgaggggatcagagcagggcgtaggtggtggtggcctgcaccgccagcttgccgtcggtgccggtcagctcgatctcgccgaacaccacggtcttgcccagccgcagcacgttggcgcgcaccagcacgtcgccgtcgatcaccgggcgcatgaaattggtggtgagcgtgaccgtggtcatcgggcggaaggcgcccagcgcgctggccacggcgacgatcatggcggtatcggcggcggacatcagcacctggccgcagaccacgccgcccgcatggcggaacgattcgctgaacggcaggcgcagcgtgacgccctgggcatcgacggcttcggcacgcaggccgagctggcgcacccatggcgccagcacgcgctccagcgtggcgtcgatatcgttgaggctgaattgcggtgcggcttcggacatggcgctcctggttctggctggccgcaccgtagccgtcctgtaacggaccgctactctgtctcctccggcgcgacgcgatgtttgaggcaatgatacagggggccggtggccagcaccacgaaggccatccggatcacgtggaacgcggtcaccagcggcacccccacctccagcaccttggccgtgatgcacatctcggcgatgccgcccggcgtggtgcccaggatcaccgtggccgggtgcgcgcccgactgcgccgacagcccccagcccaccagcgccgataccaccagcgccagcacggtgtagagcgccacgcccgacaggaagcgcggcgcggtatgcaggaactcgcgcgagaagcgcacccccagcgagaccccgatcagcagctggccggcacggctcatccaggtggggatggccgacagctcgatcccggacgcggtcagcaccgccgcggccagcagcgtgccgatcacgaacgggttgggcatgttcagccgcttcaccagcagcgccacgcccagcgtgatcgcgaccagcgccagcagccccggggcgctgaccacgcgcgggccggggatataggggtcgagcccgtggatgccgccgtactggaagatggccggcacggtcaccaccaccatcagcacccgcagtgaatgcgcggccgccacctggtcgatgcgcgcgccgttgcgctcggccaggttggccatctccgaggcaccgccgatggcggtggagaagaacgcggtcttgaaggccacgccggtggtccgccgcagcaggatggcaccgcccgcgcccagcaccagcgcgaacagcgagccggcaatgatgtagggcaggtattccaccaaccgcgccaccacgtccggcgtgaagtagagcccgagcgacgcgccaatcacccactggcccgcgttgcgggcctgcgacggcgcccgcaggtcggccccggccatgcgcgcggcggccacggccagcagcgggccgatcatccacggcagcggggtatgcagcgcggtgcagagcagggcggcggccagcccgagcgccagcgtgggcagcgcggacagccaggggttggagaagagacgcatggttcagcggcctggcacggaagcgccggcgccttgttgttttggaaaacgagagacgaaagacaagaggcccgcacaccattggcgtgcgggcctcgcaaagcttaccgcaagatcgcgcgcatcaggccgcgttgtcggcctgcgcgtgcgccgaggtgcgggtcgcgtgccagcgcaacaggcgcgggatcaccaccaccgccacggtcagcgccaggatggtggccgagatcggctggcgcaggaacagggtccagtcgccctggccgatcgacagcgcattgcgcagctgcttctcggccatcggccccaggatcatgcccacgatcaccggcgcggtggggaagtcgaagcggcgcatcaccatgccgagcaggccgaccacgaacagcagcagcaggtcgaaccacgactggcggatgccgtaggcgcccagcccggcgaagatcaggatgccgccgtacagcagcggcgtgggcacgcgcagcatgcgcacccacagcccgatcgccggcaggttcagcaccagcagcatgacgttgccgatatacagcgacgccagcaggccccacaccaggtcgcccgaggtctggaacagcatcgggcccggctgcaggttgtagttctggaacgcggccagcaggatcgcggtggtgttggaggtggggatgcccagcgtcagcagcggggccagcgtcgcggtcactgcggcgttgttggccgcttcggggccggccacgccttcgatcgcgccgaccttgccgaagtcttccttgtggtcggacagcttcttctcggtggcatacgacaggaaggtcgggatctcggcgccgccggcggggatcagcccgaacgggaagccgatgaaggtgccgcggatccacgccgggatcgagcgcttccagtccgacttgttcatgtggaccgagctgagcttgttgaaggtgcccgccggctgcgggaagaacgcgttgaacagcgcctcgcccaccgcgaacaggcccaccgccaccaccacgatgtcgatgccgtcgtacagctcctgcacgttcatcgaatagcgggtctggcccgacagcgaatccatgccgatcaggccgatgcccaggcccaggaacagtgcggtcatgccgcgcagcagcgacgagcccagcacggccgagaccgtggtgaaggccagcagcatgatcatgaagtactcgcccgggccgaactgcagcgcaacgtccgccgccaccggcgcgaacatcgacagcatcaccgtggcgatggtgcccgccacgaacgagccgatcgccgcggtggccagcgccgggccggcgcgcccgttcttggccatcaggttgccttccatggctgtgaccatggtggaagactcgcccggcgtgttcatcaggatcgaggtggtcgagccgccgtacatcgcgccgtagtagatgccggcgaacatgatcagcgcggcggtcggttccaccttggcggtcagcggcagcagcatcgccaccgtcagcgcggggccgatgcccggcagcacgccgatggcggtgccaaggaagcagcccaccagggcccacatcaggttgatcggcgtgatggccacggcaaagccgtgcatcagctggttcagggtatccattcgaagactccttgctggacgggcgggcgggctcagaagccggcgatgggcagcagcggcaggttgatgccgagcaggaactcaaacagcgcccacatcggcaccgtgatgcacaggcccatcagcgcgtcgcgcacgatgcggcggctgccgtagccacgcgccacgcacaccatcagcagcgtggaagcgatcacgaagccaagcgtgccgatcagcgccatgttcagcaccaggcccgcggccacccacaggaagccgccgaagttgtgcggcgcgttgggcagctcggcatcttcttccggcatattgcggaaaccgccgcgcacgccctgccaggtcagcagcgcgccgcacacggccaggccgacggccaccagcgtgggcacgaagcgcggcgacaggccggcgtagccctcgtcgccggaaatgccggacagcccgaggaagaaaaacagggagagcgccagcacggcaatgccgatggcgaggtgcgagggtttcatggagactccttggcctttgtcgccagcatgggtgctggcgtccgcgacgctggcaggtgctgcccgcgcggcggcagggcccggcgacatatgattatttgtctggtatcgcaggtggacaccgggccctgcgccgttttcctgccgccgggttcaccggcgggattggcaggcacgacaggtaaagcaggttgatgcggtactgccggtttgggtgctgccggcagttcttacttggccacgcccagttcacgcagcgagccgcccaggcgggccgattcgctgtcgacgaacttgccgaactcgtcgccagtcagcaggaacggggtccagtcattcttctgcagcgtgtccttccaggcctggctctcggtggccttgaccacggcgtcgatcatggccttgcgctgctcggcgctgatgccgggcgcgccgtacacgccgcgccagttatagatctcgacgttcacgccttgctccttgagcgtcgggatatcggcggtgcggtccttggaggtcaccgccagcgcgcgcatcttgccgctcttgatgaagggcaggaattccgacacgccggcgatgcccaccgtcacgtggccgcccatgatcgaggccgaggcttcgccgccgccctggaacggcacgtagttgatcttcttgggatcgacgcccgattccttggcgatcaggccggccaggatgtggtcgatcgaacccttggagccgccgccccagctgacgctgcccgggttggccttgagctgcgtggtcaggtccttgaccgacttgatcggcgagctggccggcacggtgatgaccatggtgtcggcgaacaggcgcgcgatcggggtggcgttcttcagcgtgaccggcggcttgttggtctcgatcgcgcccaccatcaccgcgcccaccaccatcagcgcattggggttgcccttgtcggtattgacgaactgggtcagcgcgatggtgccgccggcgccgcccttgttgtcgtatgaagcggtcttggcctggcccgcggcaatcatcgcggcgcccagcgagcggccggtctggtcaaagccgccgccggggttggcgccgatcatgaccttgacgctatcgagcgcaaaggccggcgcggcggcgaaggtggcggcaacggcggccgatgccatcacggcatgggccaggcgggaataggtacggcgcatagcggtctcctggtgttaccggggatgcgccatgccagcctgctggcagccgcgatccgacccgggcgttccggctgccactgcgttgcgggggacgggaagacagcctggcggactgcgcgaaaggcgcagtgccggtgcttgtctcctgtccggcgcggcggggcgtggccgggactgttcttggacttttggtgaacgtcagaccggaattaccggtcatggggcggattctaggcgggggaaactgtcaaaaggctgtcaatcgggggcagaaagggtcggggtttacgtggatggcggattgcagcgcgggcgcaggcccctcaacccgccggcttcgcctgcaggcacgggtccttgcgcgccaccgccggcaccaccacggccatgtcgaactcgccgtcggcaggcgggttttccacataccccacgctgaccacctgccccacgcccgcccccagccagcgcggcacgccgatgtcgcgccgcacgtggccgttgccggcgatcagcaccgcgccgcgctgcgcgtaggggcgcagcgtctgcgccatcaccgcatcgcgcgcggcctgcgccgccagcatcccgggcagcatggccttggggaaattgccgcagtggccccggtccagcaccgccgtctgcgcggccacgaggtcgccggggagcgcaccggacagacccagctgctggcgctcgccggccgggaacaggctgtccagtccgccgcgcacgatcttgccggcgtcggcgcgcgacaggttggccgccaccagcggcaggtcgtaccgcagcgccagcgccaccaccggccggtacagcggccattgccaggcaccgccgccggcctgggcgatcaggtagtcggcatcgcgcgggcgctcgcggcgggcgcgctcgatatcgggctggcgctcgcggtcgaactgttccatggcgatggccgggcgccagccttgctcgacggcgcgcgtcagcgcggccaggcgctgctgctgcgcggcggcgttgtcgtggacctcgcccagcagcacgtaggacttgccggcgaaggcggcgctgaccgcctcgggcgcggggcgcgtggccgcgcagccggtggcgagcacagcgacagcggcggccagcatgccggcaatgcgcaaacggaatgacatcacgcagttcctttccctatctcgttgtagtggcggggttggcggcctgcgctcccgcttgttgcccgggttggtgtgatggtcacgtcatcattccgtgacgacgcgcgggcgttccaggcggtgcgcggcgacgtcgagcgcatcggtgttcgcaaccttgtgccggcgcgcccacgtcaccagcacgtagccgcgcccgctttcaggcggatggcgcgcgcagccactacatgtcgctgatgtccgaccctggccggcacctcgaaagcaaagagcccgcagcaatgctgcggcctcctcttgtctgccggtgcctcagcgctggtgcacggtctcgcccggagccttgtccggcagcttggtgccttcagaatcaatctgcaacggccccgtcccggagaaccggtccagcgcgaggtagatcaccggcgtgataaacagcgtgatcacctgcgagaacagcaggccgccgaccacggccaggcccagcggctggcgcaactcggcaccggcgcctaagccgagcgccagcggcagcgcacccatcaccgcggcgaaggtcgtcatcatgatcggccggaagcgcagcaggcacgcctgccggatcgccttcgccggcgtcatcccttgttcgcgctgcgcggccagcgcgaagtcgatcatcatgatcgcgttcttcttgacgatgccgatcagcatcagcacgccgatcacggcaatcagcgacagctcgacattgaagatgaacagcgtcagcaacgcgcccaccgccgccgaaggcaaacccgccaggatcgtcagcggatgaatatagctttcatacagcacgcccagcagcgtgtagatcaccgcgatggctgccaccagcagcacgatctgcgtcgcctgcgacgactggaacaccgccgcgtcgccgccccagctggtgaagatcgagctgggcatggcgatctcctgccggtagcggtcgatgcgtgccgaagcatcgcccagcgccgcgcccggcgccaggttgaacgacaccgtcaccgaaggcagctgcccctggtggttgacggagattggcccgacccggcgctcggtggtggcgaaggctgagaccggcaccatctggccggtcttgctgcgcacatagagcttggagaacgcgctctcgtcggtgcggtcgacatcggccgcctgcaggatcacgtagtagttgtcgatcggcgtatagatggtcgacacctgccgctcgccgaaggccgagtacagcgcggtgcgcacgtcctgcatctgcacacccagcgcattggccttgtcgcggtcgatcgacaggtgcgcctccagcccggactgctgcgaatcgctggtgacgtcgcggaagatcggatcggcgcgcatctttgccatcagctggtcggacgagtcctgcagctggccggccttcacgctctgcaatgtgtactggtagcggctcttgctctggcgcccgcccagctgcaggttctgcaccggcgcaaagtacaccgccaggcccggcacaccggcaacatcgcgccgcagcgactcgatcaccttcggcatcgcttcgcgctcgccgcgcggcttcagttcgacaaacatgcgcccggtgttgatggcgggcgacgggccgccgccgatggcgaccacgatgctcttgaccgcggggttggcgcgcatgcgctcggcggcgtcgcgcaggcgttccgccatggcgtcgaaggagatgtcctgcgggccttcggcgttgacgcggatctggccgatgtcctcttcggggaagaagcccttgggaatggtgacgaacagcaccgcggtcagcacgaaggtcaggcccgcgaccgccaacacggtgcggcggtgcgccaggcaccagtccagcccgcgcgcatagcggtgcagcgtgaactcgaacaggttctcgaaccactgcgtggagcgcatgccgaaggtctgcttctgcacgatgtcgggctgcgccgacgcgtggtcgccgtaggcatggtgcgattcatccaccggcacgttctcggccgacaggaagcgcgcgcacagcatcgggatcagcgtcagcgacaccagcgccgataccaggatcgccagcgacaccaccgcggcaaattcatggaacaacagcccgatcacgcccggcatgaagaagatcgggataaacaccgccaccagcgagatcgagatcgacaggatggtgaagcccatctcgcgcgaacccaccagcgcggccttcagcggcgccacgccttcctcgatatggcgcacgatgttctcgagcataacgatggcgtcgtccaccaccaggcccaccgccagggtgatggccagcagcgagacgttgtccaggctgtagccgaaggccttcatcagcgccaccgtgccgatcagcgagatcggcagcgacaccgtggggatcagcgtggcggcggcgcggcgcaggaacaggaagatcaccatcaccaccagcgccaccgtcagcgccagcgtgaactgcacgtcgtggatcgattcgcggatcgagcgcgagcggtcgttgaccaccgacacattgaccgagcccggcatctgctggatcaggcggggcagggcggcgttgatcgcatcgaccactgccacggtgttggcgtcgggctggcgcagcacggccagcacaatcgagcgctcgttgttgagccagctgccggtcttgatggtctcgacgctgtcctcgacctcggccacgtcagagagccgcaccagcgcgccgctgggctggctggcgacgatgatgttgcggaaggcgtcggcgctggtcagctgccggttggcctggatggtcagggtctggcgcgcgctgtcgagcgtgcccaccggcgtgttggcgttggcgcgattgagcgccgtggccagctcgtctagcgtcaggccgcgcgcggcgagcgcatcggggtgggcgcgcacgcgcacggcaaagcgcttctgcccgaagatctgcacctgcgccacccccggcagcgtggccagcgtgggcgagatcaggttgtcgccaaaggcattgaggtcggccaggctcatcgccggcgagttgatcgccagcagcagcaccggcgcgtcggccgggttgaccttgcggtacgacggcggcaccgtcatctcgatcggcagcgaacgctgggcgcggaacagtgccgcctgcacgtcgacggccgcgtcgtcgatattgcggtcgttgttgaattcgatggtgatgctggagttgccgagcgtgttctgcgagctgatcaccgtcacgccggggatggtcgcgaactgcttctccagttgcgtggccaccgacgccgccatggtctccgggctggcgccgggcagcgtggcggtgacctggatcaccggcgagttgaagctgggcagcgccgcgatcgggatggtcggatacagcacgatgccggcgaccaccaccgccaggcacagcagcaccgtcatcaccggacggcggatgcagagttcagacagcgtcatggctcagtgccccgcggtggcaggggccggacgggcggcggcggccgaggcgccggcggccggggcctcgcgcaccagcgcgccggggcgcaggttctgcatgccttccacgactacgcgggcgccgggttgcaccccctcgaccacggcggcggcggcagtggtggtcaccacctgcaccggcacgcgcgccaccttgctgtcgggctggaccacatagacaaagcggccttcggggccggtcaccaccgcctgcggcggcaccgacagcgcgcccttcagggtctgcaccacggcgttgacgttggcataggtgcccggccacagccgctgctcctcattgtcgaactgcgccttgacgcggatggtgccgtactgcggatcgacggtgttatccacaaaggtgatcctgccggtcaccggggtcttgctgccgtcgttgggcagcgcggtgacctgcaccgggccggcgtgcagcgcctcgcgcagcgcgcccagctgccgctcgggcaggctgaaggtgacggcaatcggctgcacctgggcgatgatgaccatcggctgggtgctgttgggcagcaccagcgaacccgggaaggcgttgatcacgccggtgcggccgctgatggtggcgcggatggcgccgtagctgaccgccacgcggctggcttcgatcgcggcctggtcggcgcgcacggtggcggcaaaaccatccaccttggcctgggcggtgtcgaccgcgctcctggagatgaagttgcgctgcagcagctcctggctgcgcgcgagcgtgcgccgggcatcggccaggtcggcctggtcgcgcagcaactgggcctgagccttggccaggttggcctcgtccatgcgggtatcgagcgagaacagcaggtcgcccggcctgacggtctggccttccttgatatggacggtgcgcacggtgctggacacctgcgggcgcacctcgaccgtggacagcgcggtgacattgccgttggccgtgacctgcagcggcacgtcgccctgctgcacgcgcgcggtggacaccaccacggcggccggcgccttgggcgcgggcttgggcgcaaaccaggtacgccaggcaaaccagcccaggccggcaatgaccagcaccacggccaccaccgcccacggcgatacgcggccgcgcccggttccggtggccgccctccagttgctgtcgacgaagcccttgggctggtcgatcctgtcagatttcatatttgtgtggaccctctgcaccgcgtcttcgcgccactccccgtaatcgcccggctggttgtgcccagatgttgccggtgcgcgtcgcgcaaagactctactagtaccgcgcttcgcccgccggagccagcgccgcgtattacagtccgttacagggttgcaagggtctggtaatgcccggcaccggcaaacgccgtccgggccacaggggaggccggagatgtgtttagcggggcgcttgtatggttagacaaacattatcagaaaagctgccgccggccatcgcggcgccactgattgacgctgtcgaccgacagttcgcgtggcccggcctgcacaaccacgacatcgccggcgcgcacttctcccttcagcaccacgctgaggtagaccccggagtagccgctctggatcatgtcgcgcaccgcgtggcggtagcccagcgcggcattgaacttgtagcagggcttgcgcggcgactccacccgcagcagggccgtgcccacgcgcacgaggtcgccgatccagagttgggattcaagcagcccctccagggtcaggttctcgccgatggcgccaaacggcaacggcgggcctgactcaggctgcccgcacgcgcggcggcgcgcgttccaccacgggtagtgctcgaagggataggcgtagaccgccttgtccaggccgccgtgcacggtcaggtcaccctgttcgtcgccggccaggcccagcggctgcacctgtacccgcaacgggtgcagcagggtactgacagggtgcttgcgaatgcccgacagcaccaccgcctcggtgccagcccccgcgaccaccagcgggatggccttgcccaggcttaccgccagcacgcgcgcaaggcccggccgaggtctggattcgctcacgtgcgcccccgcttcgtggttacccttccggctgtggaaagggttgtggataagctgcggatatgcctgaggataacggggcggataacactgtggacaagtgcttggtgcggtccctcacaaggaagccggcggcggggagccgcctctggtttcagccttgcatcacacctgctgcgccgcctgcggccgctgccactggcagcccagcgcccgggcgcgttgcgataccgccagcgccgccagcatcagcgccgccgcgccccagtgcagcatatcggcgccggccagcgtatagatggcggccccgaccatggcgccggcggcctggcccaggtagatcgatgaagaattcagcgagatcgacaccgatgcacgctccggcgccagcagcaccagccgcgcctgctgcgcgctgttggtggcaaacccgcccgcgccccacagcatgaacagcaacaccagcgcaacgctgcccaacccggccagcggccacagcaccatggccgtgatcgaggtcagcagcgtgacctgcacgatccggctgggcgtgacccggtccatgcgcgacgccgccatggcattgccgaacacgccgcaggcgccgtaggccaggaacatcaggctgagcgcgccaccgctgatgccgtaaacgtcgcgcatcagcggggcgatataggtgaacacggtgaacatgcccgccgacgagatcatggtggtcagcaccaccagcatgatcggcttgtggcgcagcaccgcgccccaggcctcgcgcccggccggcggcaccttcagcccgcgcggcagcgcgcgccagaccgccgccgacaccagcagcgccagggccccgaccagcgccatgctgacgcgccagcccagcgtgctggaaatccacgtgcccagcggcacgcccaccacgctggcaatgctccagccaagaaacacaaagctgatggcacgcccgcgcgtctgtgcgttgaccagcagcggcagcgtggcggcggtctggggcgtatagatggccgcgccgatcgcggtcaggaagcggatcgccatcagcgccgcaaagctgggcgcaaacgcggcggccaggtgcattaccccgtagaccagcagcgacccggccagcagcagccggcggtcgatgcgcgagcccagcgtggcaaacagcggggcgccgatgcaggtggccagcgcaaacaccgagatcagctgcccggcgctggccgcgcccagcccgaaatcgccggcaatgtcgttcaacatgccggtaacgatcatcgcaccggtgccaatgacgaagttgccgacgcagagcgtcactagcctggggtccatgccggccttgggaattgtggattggcgcagggggcgccttgttgttgtctgggctgccgcgggccctggcaggccgggcggtaagggaagtcccgagtgtagcggtttcatggaattcgcgtttcccggaggaaatgcccggccagatgtgaaacacccctgtcccgcatggcggaacaggggtgtcgggggcgggccgtccggaggcaatccggccgctggtgactcagcgcgtcagcaccggcgccagcgccttcgggttgacgatgcagtcatggttgccggccagcacgtccaggatgttctggaacgcggtgcggaagtacagctcgtagctgtcgcgctcaacatagcccaggtgcggcgtgcagatgcagttttccatgcgcagcagcgcgtggccctgcaggatcggctcggactcgaacacgtcgatggccgccatgcccgggcggccccggttcagcgcggtgaccagcgcgttctcttccagcagttcggcacggctggtgttgacgaacagcgccgtgggcttcatccgggtcaggtcagtcatcttgacgatgccgcgggtgtcgtcattcaggcgcaggtgcatcgacagcacatcgctgtcggcaaacaactgctccttagattcggccacgcccagcccgtcggcacgggcgccttcgagcgacgcctcgcggccccagaccagcaccttcatgccaaaggcgcggccgtagccagccagcagccggccgatcttgccgtagccccagatccccagcgtctggccgcgcagcacctgcccaaggccgaaattgggcggcatcgtcgtcgatttcagccccgattgctgccaggcgccatgcttcaggctggcgacgtattggggaatgcgtcgctgcgccgccatgatcagcgcccaggtcagctccgccggcgcaactggcgaacccacgccctcgagcacagccacgccacggtcggtggcggcatccaggtcgatatggctgccggggccggcgccgaccttgccggtctggctgatcagcttcagtttgggcagtttttccaacagttgccgggtgatgcgtgtgcgttcgcggatcagaaccacggcttcgacgtctgacaggcgtgcggccagctggcccacgcccttgacggtgttgttgaacaccttgacgtcgtgcccctccagcaagctgaagcaaggcagtttgcgcacggcatcctggtaatcgtcgagtacggcaatcttcatcggcaactctggttatctaacggtcttgtgccggttggtgcgcgcggccaccgagcagcgcgccggccaacagtattgttgagaaatatcgaaaaacccgcgccggccggtggcggcgattgttgcatagcaaaaaacaggggggtgcgccagtggtatccttgcccgttccggtgccgccgcggattgtcggtcgagcattgctcccgccacgcgatcgcacccgggcaaagtccggccagcccgcgcagccacccctgcgcgcgcgaagcgcaactgtagcgcagccgcagggaccgccgcgaccttttgcataaacggggccgccgcggagttgtaacgggatgtgtcgatccgagtgtgaccatcactccgggcgtgtgacggccccatctgcccgctggccaggctttgcaaggattccttcccttccttcccctttacgaatctggagtctgcagtatgaaccaccccacgatgcaaggtacggcgcccgtcaatgcgccggcctgggtcaagcaccccaagctggtggcctgggtcgcggaaatcgccgccctgaccaagcctgacaatatctattggtgcgacggctcccaggaagaatacgaccgcctgtgcgagcagatggtcgccgccggcaccatgaagcggctgaacccggccaagcgcaagaattccttcctggcactgtcggacccctcggacgtggcgcgggtggaagatcgcacctttatctgctctgaaaagcaggaagacgccggccccaccaacaactggaccgcacccgccgagatgcgccagacgctgaacggcctgttcgacggctgcatgcgcggccgcacgctgtatgtggtgccgttctcgatgggcccgctgggttcgccgatcgcccatattggcgtggaactgtccgattcgccgtatgtggcggtcaatatgcgcatcatgacgcgcatgggccgcgccgtgtacgacgtgctgggcaccaacggcgagttcgtgccgtgcgtgcacaccgtgggcaagccgctggccgccggcgagcaggacgtggcctggccgtgcaatccgaccaagtacatcgtccatttcccggaaacgcgcgagatctggtcgttcggctccggctacggcggcaacgcgctgctgggcaagaagtgctttgcactgcgcattgcatcgaccatgggccgcgatgaaggctggctggccgagcacatgctgatccttggcgtgacctcgcccgagggcaagaaataccacgtcgccgccgcgttcccgtcggcctgcggcaagaccaacttcgccatgctgatcccgcccaagggcttcgagggctggaaggtcaccaccatcggcgacgacatcgcctggatcaagccgggccaggacggccgcctgtacgcgatcaacccggaagccggctacttcggcgtggccccgggcaccagcgagaagaccaactacaacgcgatggcgacgctgaaggaaaacgtcatcttcaccaacgtggcgctgaccgacgacggcgacgtgtggtgggaaggcatgaccaaggaagcgccggcgcacctgatcgactggcagggcaaggactggaccccggaaatcgccaaggccaccggcgccaaggctgcgcacccgaacgcccgcttcaccgcgccggcatcgcagtgcccgtcgatcgacgacaactgggacaacccggccggcgtacccattgatgcgtttatcttcggcggccgccgctcgaccaccgtgccgctggtgaccgaggcccgcaactggaccgaaggcgtctacatggccgccaccatgggttcggaaaccaccgccgcggccgccggccagcagggcgtggtgcgccgcgacccgttcgccatgctgccgttctgcggctacaacatgagtgattacttcggccactggctcgaactcggcaagaagctggaagccgcgggcgcgaaactgccgaggatttactgcgtcaactggttccgcaaggacgccgacggcaacttcgtgtggccaggcttcggcgagaacatgcgcgtgctgtcgtggatgatcgaccgcgtggaaggcaaggggcaagccgccgagcatatgttcggcactaccccgcgctaccaggacttgaactggaatggcgttgacttcacaccggcgcagttcgcgcaggtgacttcaatcgaccgtgaagcgtggcagcaggagctggtgctgcatgatgagttgttcaccaagctgcggcatcggctgccgcaggcgctggcggatgtgcgggcggcgctgggcaagcggctggaaggctgatcgcgccacggttcgcgcagttcgcaataaagacgcccgtctctgccgagacgggcgttttttttatcccgcctcgctatcccccagcgtctccactgcgtacttcaccaaccccgcccgcccctcgatccccagcttgcgcttcaggttcagccggtgcgtctccaccgtgcgcaccgaaacccccagctgcgccgcgatctccttgttggccaggccccgcccgatgccgcgcaggatgtcgcgctcgcgcggcgtgagcgcatcgagcggccctgcggcggggctctgctcggccatgccgcgcgcaatgcgggcgctgtagaagacccgtccggccagcacggactggatcgccgccatcagctcgtcggcgggcgcgtccttgagcacatagccgcgcgcacccgcacgcaccgcctggcgcacgtattccaggttgtcgtgcatcgacacgatcagcaccgccagttccggatagcggtcatgcagcgccgcggccagggcaatgccgcccatgccgcgcatgccgatatcggtgatgaccaggtcgggcagctcggcggcaccggctcggtccagccacgccagcgcggcctcgccgtcgtcggcttcaccgaccacgcgcaggccgggctgcagcgccagatgcatgcgcattccgtcgcgcaccagcgcatggtcgtcgatcagtaatacgcgggcgggcacttcggcggagtcggctagctgggtcatgacggcgagggtcctgctgaaacgggatcgtgcgcaatggccgcgggcctggccagcggcagtgaagcgaccagctgggtgccgcccatgcccgaaacgatgtcgaactgcccgcacagcgcggcgatgcgctcgcgcaggttgcgcagtccgatgccgcgctgcgggtcctcctgcatgcgcgccacgtcgaagccatgcccgtcgtcgcgcacggtgaggcgcgtggcatcggcatcgaaggccagcgccaccacgacccggcgcgcgccggcatggcgctcgacgttggtcaaggcttcctgggcgatccggaacagcgccgtggcctgctcgtcgggcagttcgcgcggggtgccgctctgagtcaccgcaatttccagcccgctgccgccctgcatctcgcgcgccaggtgctgcagcgcggcgtacaggcccaggtcgtcgagcagggcggggcgcaggttgcgcgccacgcggcgcacttcattgaacacggtatcgagccggttcagcgccatgcccagcaccggcgccaccgcggcgccttcggccggggccaggcgcaggcggttggtggcggtttccagcaccagcttgaccgacaccagcagctggctgatgccgtcgtgcagctcgcgcgagagccgggcgcgctcttcttcctgcgactgcaccacgcgctgcgccagctggcgcagcttggcgtcggcctcgcggtgctcgctgacgttcagcgccaggccgctggcggcgaccagcaggatgctgatgccggcaatcacgccgatccaggccatggtctggcggatatcggtctcggcacgggcatcgagctggcgcagcgtgctttccacgtcatccaggtagatgccggtgcccaccatccagccccattcgggcaccgccaccacatagccgagcttgggcgccagctgctgcgacgagggctttctccacaggtagcgcaccgcgccgccaccgcccttggctgcggcaatcagttgctggatggtcagcgcgccctgcgggtcgcgcagcgtccacaggtcctggccgaccagttcgggctggcgcgggtgcatcaggttgcggccgtgcaggtcatacaggaagaaatagccgtcggggccgtagtccagccgcgcaagtgcctccatcgcggcctgccgggtggcggcgtcggtgcgcccggagcgcaccagcggcgcgatcgcgctctgcgccagttctacgtagtggcgcagctcggtttccttgctctgcaggtaggcggcctcgaccagcgcgcgttcatgctgcgcgagctgcgtggcctggaagcgcacggcaagtgcgatgcccagcatggcaaccgcaagtggcgccacggctagcaacaggatcttctggcggagtttcatacgagtgcggggggaccgggggtaaacaccgatgccgcgcaggcggcatgccaccgtcgatttgcgtagtactacgcagaagtgctgcgtagttacgcgcttgtgcggggtttggcgggtgtcaatactacacgccgaacgcgccgccgccccagcagggcgcatgcgcggacgcagctggtgcaccgtccacacccggacggtgcgtcgcctgcctgcaagacgagatccggaaacgacgacacaaccgggcgcgcagcagctatcccaggagacaccctcaccgccggattgcccccgctgcccgccctcggcgcacccccgctgccgatcctgccagttgcctgttaccagtctttcgccgccgcaggctatccatatcccggtctgaggagacccttcactatgaatcgcatcggagaacacctggtgtggctggctgtcgccgtccttggcgcgtttgccttcggcactgtcgcgctggcgcgcggcgaggccgtcagcgcgctgtggatcgtggttgccgcgctctgcatctacctgatcgcctaccgctactacagccgctttatcgccgacaaggtgatgcagctcgatcccaaacggatgacgcccgcgtggcgccataacgacggcctggactacgtgccgaccaacaaggcggtgctgttcggccaccacttcgccgccatcgccggcgccggcccgctggtcggcccggtgctggccgcgcagatgggctatatgccgggcatgctgtggctgctcgccggcgtggtgttcgccggcgcggtgcaggacttcatggtgctgttcatctccacgcgccgcgacggccgctcgctgggcgacctggtcaagtccgagatgggcacgatcccgggcatgatcgcgctgttcggctgcttcatgatcatggtcatcatcctggcggtgctggcgctgatcgtggtgaaggcgctggccgactcgccgtggggcacgttcaccgtggcggtgacgatcccgatcgcgctgttcatgggcatctatacgcgctatatccgcccgggccgcatcggcgaggtgtcggtgatcggcttcgtgctgctgatgctggccatcatcggcggccagtacgtacacgagagcgccgtgctggcgccgctgttcacctatgacggcaaggcgctgacgtggatgctgatcatctacggctttatcgccgccgtgctgccagtgtggctgctgctggcgccgcgcgactacttgtcgaccttcctgaagatcggcaccatcatcgcgctggcggtcggcatcctgatcgtcgccccggacctgaagatgccggccttcacgcagttcgcgcaaggcggcggaccggtgtggtcgggcaacctgtttccgttcctcttcatcaccatcgcctgcggcgcggtgtcgggcttccacgcgctgatctcgtcgggcaccacgcccaagctgctggagaacgagacccacgcgcgctttatcggctacggagcgatgctggctgaatcgttcgtcgcgatcatggcactggtagccgcctcggtgatcgagccgggcgtgtacttcgccatgaacagcccggcggccgtgatcggcaccacgccggaagcggtggcgcacgcggtctcgacctggggcttcgtgatcacgcctgacgtgctggtgcagaccgccaaggacgtcggcgaaaacaccatcctctcgcgcgccggcggcgcgccgacgctggccgtgggcatcgcccatatcctgcaccaggtggtgggcggccaggccatgatggcgttctggtaccacttcgccatcctgttcgaggcgctgttcatcctgaccgccgtcgacgcgggcacccgcgccggccgcttcatgctgcaggacctgctgggcagctttatcccgtcgatgcgcaagaccgattcgctggtcgccaacctgaccgccaccgcgctgtgcgtggcggcatggggttacttcctgtaccagggcgtggtcgatccgctgggcggcatcaacacgctgtggccgctgttcggcatctccaaccagatgctcgccgcggtggcgctggtgctgggcacctgcgtgctggtcaaaatgaagcgcggccagtacgcctgggtcacgctggtgccgaccgtgtggctgctgatctgcacgctgaccgccggctggcagaagctgttccatgccgaccccaaggtcagcttcctgacccacgccgccaagttcagcgccgccattgccgaaggcaaggtgctggccccggccaagtcgatggagcagatgcaccgcatcgtcttcaacgactacctggacgccggcctgtgcgcgctgttcatgctggtggtgctgtcgatcgtgttctacggcttcaagaccgcgctgcaggcgcgcgccgcgaagcgcccgaccgacaaggaaacgccgttcgagccgctgccgggcgccgcctcggcccagtcctgataccggagcccgccatgctggaacaactcggaacgatgggacgctacctggggcagtcgctcaggctgatggtcgggctgcccgactaccagacctacgtggcccatatggaaagcacccaccccgaccgcgagccgatgagctacgaggaattcttccgcgagcgccaggaggcacgctacggcggcgggcagggcaagtgctgctgagcacacgctgaacgccgtcctcctgcggggccggcggcatacaaagcagacaggcgatcacttgatcgcctgtctttttatcaagtgttgcgtgtttaccgcgcttttgtaatgcacggataccgtttctgtagcgggttacagggctttacaggtagttacagcaagggtgcggctccttctctacacttgcgacacatcatggcaattcgaggaaaaaagatatgactcgccatcccgttcgcaatctgaccattgccctcgccctggcggcctgcgcgctgccggccgtcgcgagtgacatgaacaacgccctgggcggcgcactcggcggcgtcgccggtgccgcggtgggcggcgcgctgggcggcagcaccggcgcagtgatcggtggtgcagtgggcggcggcgccggtggcgcagtgacctccaaccgccgtgagcgcaccggtgccatcatcggcggcgcgctgggtggcggtgccggcaccgcagctggcaacgccatgggcggccgcaccggtggcctgatcggcgccggcctgggcggcggcgcgggtgcggcgctgggcggcaatgtctcgcgcagcaactcgtacgacgatgaccaccgccgctattacaagagcagctacaagcgcaagaagcacaagcaccatcgccaccactacgacgactaagaagtcgtagtggtcagcaaaacgggccgtcatggcccgtttttcatttgcggcgtctggcataatcattcgccagtgcttgcaaagccgccggatgcagaaacaaagaagcccgcaaccggaaccggtgcgggctttttctccaataaaggcggagaggctgcaaggcgctcccccaaggacctgtggagaccaggtttgaagcaggcggggccgcacaagcggaggaagcggccccgggatcgcgctgccagagaccgccggggaggcaggcctgaggcggccaggcggccttacagcggcgcgcgatcggtagtggtgtcgtacttgccgccttcggtgtaggtgtcgaacttgccggtgcgggcgccatcgacgtacggatcgaacttgccggtgcgggcgccgtcggtgtacggatcgaacttggctaccttggcgccgtcggtgaacacatcgaacttgccgttcttggcaaaggccggtgcggccgacagggcggcggcgagggtggcgacagcgatcagggcgtagcggttggttttcatgattcaggctttctctattgcatggatgcctgagccgtcacttcgacgaaagactatgttgcattgcggcatccgatggctagatattaggcatttccctcatatcaataaatatcaggatccacaatgattagttttgattcgaacaataaaataggctgattacgtaagaattcagcgcagaaccgggagactgtgtcatggatcgcctgcaatcgatgcgtgtgttttccaaggtggtggaactgggaagcttcgcgcgtgcagcgcagcagctggaaatgtccaacgcagtggtgacgcgctacgtggccgacctggagagccacctgggcacgcgcctgctcaaccgcaccacccgcagcctgtcgctgaccgacgccggcgaaacctacctgcagcgctgccagcagatcctggaagacgtggaagaagccgaaagcgtggtcacggcgcgcagccagtcgctgtcaggcacgctgcggctggtcaccccggtgatgttcggcctgcacctgctgccggaattgctggcgcgcttccagcagctgtatccggacgtggtgttcgacgtgatcctgtcggaccgcaacgtcgatatcgtcgaagaaggccgcgacgtggccgtgatgctgtccgacctgggcctgggctcgcacctggtggcgcgcccgctgctgtcggccgaagtgatcctgtgcgcatcgccgggctatgtggcggcgcacgcgccgatccgccatgcccatgaactcagccaccaccgctgcattgccatgcgcctgcccagcgccgagcacgaatggacgctgctgggcccggaaggcgaggtgaccgtgccgatccgctcggggctgctgtgcagcaatgccgagctggcccaccaggcggcgctggccgacatgggcgtggccatgctgtcgtcctacctggcgcgtcccaatatcgaatccggcaagctggtgcatgtgctgccgcaataccagctgccgcggcgcgatgtcagcgtggtctacccgagccgcaagttcttgccgaccaaggtgcgcgcctttatcgacttcctgctcgaagaagggcaggtacgcggcaaggaagcgcagccggcgccagccgccagccacggcacgcaagccgtgcgcacctgagcggctacctaggccgatccacccaaagcaaaacgcccggcgatgccgggcgttttgccgtgacgcgctgacgcttactcgccggcggccgccgcgcgcgacttcttggccgcggcggtcttggcgggggccttcttggctgccgccttcttggccggtgccttggtggccggagccttggcggctggcgtcttggccgcggtcttcgctgccgtcttggttgccggcgccgcctcggccgtgccattcgatgccgccttggccgtggtcttcgccgccgtcttggcgcccgccttgggctcgcgcgcctcgaactcgaagccgatcttgccgtccggctgcttgaccaggaaggccttgaagttgcggccggtgcgcgacgacttgaaccccgtcagcaggtcggtcttgccgtcagtgagcagcttgccgatctgctcgcggctgatttcctgctgcaggatgatcttgccggtggtgaagtcgcagctcttggggctggtcgcgctgttctcgcagacgtacttcatgccgtgctcgaacaccgagccgccgcacttcggacaggtgcccaccggctcctggccgctgaagtcgaccggctcgccgtcgttgtcgtcgtcgttctggccgaagtcgaattccatcttgtaatggccttcgtcgtccttgcccagcttgaggatggcggcgaacggacggcccatcttgctgcggaaaccctgcagcggaccgatttccttcttcagcagcagttcttcgacctcatcgatctcgaactggcgcccgcccgggatcttgctgatcgagaactcgcacgcggtgcaggcaaagcggcggtagttctccttgacctgtccgccgcattgcgggcacggcgtgtccagcgtggcgtagtcgcccgggatggtgtcgctgtcgtattccttggcgcgcttgacgatctgctgggtcatctgcgcgatctcaagcatgaactcgtcgcgcttcaggcgcccgcgctcgatctgcgagagcttgtgttcccactcgccggtcagctcggcctgcgtcagttcctgcacgcccaggccgcgcagcagcgtcatcagctggaacgccttggcagtcggaatcagttcgcggccttcgcgcaccaggtatttttccgtcagcaggccttcgatgatggccgcgcgcgtcgccggcgtgcccaggcccttgccggccatggcctcgcgcagcgcgtcgtcgtccaccagcttgccggcgccttccatcgccgacagcagcgtggcttcgttgtagcgcgcgggcggcttggtggtcaggccgacgctctcgaccttgtcggtcttgaccttctcgtccttggccaccggcaccaggttggcggcatccttgtcgccctgcgcctcgcggccgtagatcaccagccagcccgggttgaccagcaccttgccttcggtcttgaagtggtggccggcgacttccgtgatgcgggtggtgacctggaactcggccgccgggaagaacaccgccaggaagcggcgcactaccaggtcgtacagcttctgctccggttcggacaggttctttggcgcctgcagcgtcgggatgatggcgaagtggtcgctgatcttgctgttgtcgaagatcttcttgttcggcttgacccagccctgcgccagaatcttcttggcgtgcggcaggtagttgggcgagctgtcggccagcatgtccatggtctgcttgaccgtgtccaggtagtcctcgggcagcgcgcgcgcatcggtacgcgggtaggtcaggaccttgtgcttttcatacagcgcctgcgccaggccgagcgtgttcttggccgagaagccgaagcgcgagttggcctcgcgctgcagcgtggtcaggtcgaacagcgccggcgactgctgcgtcgacggcttggattcctcggtgacggtgcccggcttgtcgcggcaggcggcgacgatgctcttggcctcggcctcgctccacaggcgcgattcgcgcgcctcgggatcgaactcgctcttcttgaacttggggtcgaaccagcggccttcatacaggccggcggcggcgatgaactcggcccgcacttcccagtagtcgcgcggcacgaagtgcttgatcttctcttcacgctccaccacgatcgacagcgtcggcgtctgcacgcggcccacggtggtcaggaagaagccaccgcccttgctgttgaaggcggtcatggcgcgggtgccgttgatgccgaccagccagtcggcctcggagcggcagcgcgcggcgtcggccagcggcagcatgtcttcgtcttcgcgcaggctggcgaagccatcgcggatcgcctgctgcgtcatcgactgcagccacagccggcgcaccggctgcttggccttggcctgttgcgcgatcagccggaagatcagttcgccttcgcgtcccgcgtcacaggcgttgatcagggcggtgacgtccttgcgcttgatcagccggttcagcaccttcaggcgcgactcggtcttggcgatcgggcgcaggtcgaaatgcggcgggatcaccggcaggttggcgaagctccacttgccgcgcttgacctcgtattcgtccggcgcggcgatctcgaccaggtggccgacggcggaggacagcacgtagtcgtcgctctcgaaatactcgtcgtgcttggtaaaccccccgagggcacgggcgatatccgccgcgaccgacggtttttccgcgatgatgagggcttttgacatgggaagggtccttgcgagctgcatccggcaacccgcgaattgcactacaaacgaagtaatcagaacgccggggggctatgaggcgccaataataagcgcgctttcaacggcggtgcaagcaagccccgccgccgaccctgtcgccgcctaggcggcgctgctccccccggcaagcaaccagtccagcacctgcggcacgtcttcggcactcgccggcatcgccgcaccgcggctcagcatgcgttccagcacctcgatgtgcggcagcagggtgccatagaactggggcgtgccgcccgacgcaggctgcaccagcagcgtcgggaaattctcaatatcgatatcgccaagcgcatccgcgtgcgtctcgatgtcgatccagacgaagcaatcctccggatggcgcgaggccagcgcggtcagcgccgccaggtagtcccggcacgtgccgcaccactgcgcgcacaggcaggccaccaggcggccctgcggccgcgctgccaggcacccggcaatggcgcctgcgtcacgttctggaaagtaaacggtcatggcatcggaaacatgaggcgcccgcggcacgcgggctgccggcgattgtatcggtattgcgctgcggctcacccaagccgccgaaacacgtttcccggtagacgctcggcgtgcccggccagttccagttccagcaggcgcgccgcgacggcttccggcggctggccgctgcgctcgcacagcgcatccagcgtaaccggatcgtagccgagagcggccagcagggggtcggcgtggccggcaaagtcagaaagatctggttgctccggtacggacgcgggaacgcgcgcggcagcggggcgggcaggtgccggcagcaggttgatctcttccagcacatcctccacgcgctccaccagcttcgctccctggcggatcagcaggtggcagccggctgacagcggcgcgtggatcgagcccggcaccgcaaatacctcgcgccccaggtcggccgccagccgtgcggtgatcagcgagcccgagcgcgccgcggcctccaccaccagcaccccgcgtgccagggcggcgatgatacggttgcggcgcgggaagttggcgggcaggccctgcatgccgagcgggaattcggtgacgatcgcgccgcgcgcggccacttcgtgggccagcgccaggttctcggccggatagacccggtcggcccccgtacccgtaacagcgacggtaccgccgcaaccctgcagcccgccggcatgggcggcggcatcgacgcccagcgccagccccgagaccaccgccagccccgactcggacagcgcccgcccgaaggcctgcgcatcgcgcttgccctgctcggtggcgccacgcgcgccgacgatggccaccgcaggacgcgccagcagcgcgggatcgcccttgatatatagcagcggcggcgggtcgggcaggtcgaacaggcgggcagggtaggcgtcgtcgccaaacgtgaccacgtggttgccgggcgtgccgagccaggcgagggtgcgttcgaccagtgccggcagcccggtgccgggcctggccagcaccgcgcgggcgtgtttcttggggacgacggacgacagcgctgccacgctctgcgccaggatctgctgcggcaacccgaatgcggtcagcagcaggcgcaccgtgaccgggccgaccccgggcgcgcaggcgagctgcagccacgccttcagctcgtcgggatcgcgcgtggtgagctgccgggcagcgcctgcatggcaaagagaagcggcggccgccagggccgcctgcgatgtcgccaagaccggctcagcgcggcgaggtcgcccggtcgccgaccgcgatcacgttggaggcgtcggtgaccagcgcatacgacacccccgggaacacgcggaagacaaaggccaggccgtagcgctcgtcgggcaggcggatggcgcggttgctgtcggtcttgtcggcgacggtctcgccagtgcgcgacagcgccagcacatgcccgggctccaccccggcctggctgccgaggttgagcaccaccacctgcttggcgccgccgaactcgaccccgccatagaccttggccacgcggccgtcgagttgcgtatcgggcgcgtgcggcacatagcgcgccgcttcgcgcgcgggctgcggcatcagcagcgtgcccacgcccatttcctgcctggcctgcgtgacctgcatggtcgagaccgcatccgggccctgcgcagcgcgcgccaggcgcacgttgccttcgtattcggcctcgtagccgagcacggcattggagacggggtcgcgcaccggggtgaccggacggtaggcctgccagtcgctgccttgcggcgcgtcggcggggatgccgcgcgcgtagccggtatcgtcgcggccaaggatgacgcgcgactcggacacggcgacgatgcgtgccgaggtggccagcgtatcctggtcgaccaccagcgggcggatcaggaaaggctcgatatcggaagacgcgatgctcaggatggcggcgccgtcggcggcgttgccgcgtatctgcggcgacaggcgcaccgtgccgctgccggcgggcgtggtcgacagccaggcgcggccgtcgcgctggatcaggtacagcatctgtcccggatagatcaggtgcgggttgcggatctgttgccggttcatgccccatagctcaggccagcgccatggctggcgcaggaagcggcccgagatcccccacagcgtgtcacccgtgcgcacggtgtactgcgacggcgcattggcagccaggtctgaaacggggatgccctgttgggccgtgcgctgggcttcggcctgctgcgccggcgtgaccgtcaggtccgcagccagggccggaagcgcggccgccgcagtgatgccagcggcactcagcaacgcataggcaagcttagggatgaacgcgtgcagcctgcggcccgacgccgcctggtgttctttggtaagatcgcgcattttcctgaccggccggtggtttcggccggattgacccgggagagcgtgcctgtttcggcgcgccttgaatttttgtacttgcgccccgattctgcatgtaaacacccgccgccgcaacgcggcccggttgccggcagcagccggcgttgcgcctgagcatcatggcaaaactcgatatcctgacctaccccgatccccgtctgcacaccgttgccaaacccgttgcggcagtggacgaccgcatccgccagctggtgaaggacatggccgaaaccatgtacgaagcgcccggcatcgggctggccgccacgcaggtcaacgtgcatgagcaggtggtggtgatcgacgtctcggaaacgcgtgaccagctccaggtctttatcaacccggagatcgtctgggccagcgacaaccgaaaggtgtgggaagagggctgcctgtcggtgcccgaggtctatgaccgcgtcgagcgccccgaccgggtgcgcgtgcgcgcgctcaacgagaagggcgagagcttcgagctcgaagcagacgacctgctggccgtctgcatccagcatgagatcgatcacctgcgcggcaaggtctttgtcgaatacctgtcgccgctcaagctcaaccgcatcaagagcaagctgcagaagcgcgagcgcacccgcatgtaagcggcgccctgccacaaagatgtaacagcccgcccggattcccgccgccagcgcgcggcacccgcgcggggtctgttatctttatgacttccgaagaacaaaagaaccggccgcgatagcggccggtcctgtttcaggccacggaacctgccatgtcccaagccagacccctgcgtgttgcctttgccggcacgcccgagttcgcgcgcgtcgcgctggaagccatccacgccgccggttttcccatcgtggcggtgctgacgcagcctgaccgccccgccggccgcggcctgcagctgcacgccagcccggtgaagcagttcgccgccgccagcggccttgggccagtgctgcagccgcgctcgctgcgccgccagggcaagtacccggaagacgccgccgcggccatcgacgcgctcgccggcactgcgcccgacgtgatggtggtggccgcctacggcctgatcctgccggccgaggtgctggccctgccgcgcctgggctgcctgaatatccacggctcgctgctgccgcgctggcgcggcgcggcgccgatccaccgcgccatcgaggcgggcgatgccgagaccggcatcacgctgatgcagatggacgaaggcctggacaccggcgacatgctcacgcgcgcggccgtgccgatcggcccggacgacaccaccggcacgctgcacgacacgctggccgcgctgggcgcgcgcatgaccgtggcagcgctgcaggagctcgccgccggccgcgcgctgcccgccacgccgcagccggccgaaggcgtcacctacgccgagaagatcgccaaggacgaggccccgctggacctgcgccgcccggccgcggcgctggccaaccaggtgcgcgcgttcaaccccttcccgggcgcgacggtgcaggtcggcgataccgtgatcaagtgctggcaggccgtgccgctggccgccgccagcagcctgccgcatccgcccggcacagtgctggcggccgacgccgccggcgtcctcatcgcctgcggcgagggcagcgcactgcaggtcaccgagctgcagaagccgggcgggcgccgccagccggcgcagcagttcctgcaggccctgccgctgccgccgggcacgcgctgcgcggtacccggcaacggcgccgcgcaggcatgatcggacgggccttggccgcacatggcggcataagtgccggcggcaccgccccggccggcgcaagcggccacggctcccccctgaaaccgttgaacagccgttgaattttcgggtatcgccccctatctaacggtcatcgcgtccgctttcccccgggacgcggctcacgattacacggagatcaccgcaatgttcaactgggtcaagaccttcatgctgatggcggccatcacggcgctgttcatcgtcatcggcggcatgatcggcgggcgcagcggcatgatgatggcgctgctgcttgcgctgggcatgaacttcttctcctactggttctcggacaagatggtcctgcgcatgtacaacgcgcaggaagtcgacgccggcagcgcgccgcagttctacggcatggtgcaggacctggcgcagcgcgccggcctgccgatgccgcgcgtgtacctgatcaacgaagacgcgcccaacgcctttgccaccggccgcaacccggagcacgccgcggtggcggccaccaccggcatcctgcgggtgctgtccgagcgcgaactgcgcggcgtgatggcgcatgagctggcgcacgtgcgccaccgcgacatcctgacttcgaccatcgccgccaccatggccggtgcgatctcggcgctggccaacatggcgatgttcttcggcggccgcgacgagaacggcaaccgcagcaacccgatcgccagcattgccgtggcaatcctggccccgctggcggcatcgctgatccagatggcaatctcgcgcgcacgtgaattcgaagccgaccgcggcggcgccgagatcagcggcgacccgcaggcactggccagcgcactggacaagatccaccgctacgcccagggcatcccgttccaggcggccgaagaacacccggccacggcgcagatgatgatcatgaacccgctctcgggcggcgccatcgccaatttgttctcgacccacccggccaccgaggagcgcatcgcgcgcctgatgcagatggcccagaccggcacctatcccgcctgagcggccggaaatccggggcagggcccccgcacagggtaaactgcccgctgttccgcatggaccggcgggctttttttgtgcccgcgccggcctgcttcccgattccaacgcctgacccgccgcctgaccgatatgcgcctgcctcccgattcgcttgccttccagatgcttggcgccgccgccgcggtgcgcgccgtcagcgaaggcacagccttgccccaggcgatcgaggacgccgccgcgcagctgcggctggaccgcgtgcaggatgccgccacgcgcggcgcgctgcaggacatcgcctatcgcaccatgcgccagttcggtacggcacgcgcactggtgacaaagctggtcacgcgcccgccgggcgcgcaggtcgattcgctgctggcggtggcgctggcgctgctgctggaacacgcaccgggcccgcgcgacaagcaggacggcgcggacgccggccgcccgggctacagcaccttcaccgtggtcgaccaggcagtcagcgccgccgcctccgaacccaagactgcgcatgcgcgcggcctggtcaacgcggtgctgcgccgtttcctgcgcgaacgcaaagcgctgctggccgaggtcaaccgcgacgagcaggcgcgctggaacctgccgccgtggtggctgcgcatgctgcgcgaggcctacccggaccagtggatggccctggccgccagcgccaacgtgcgcccgccgatgacggtgcgcgtcaacaccgcgcgcgtgtccgtgcagcagtaccagaccgatcttgccaacgccggcctggccggccacgtggttggcccgcaggccgtgcgcctggtgcgcgcggtgccggtgacgcagttgccgggctttgccgaaggcgtggtctcggtgcaggatgccggcgcgcagctggctgcgccgctgctcgaggtggccgacggcatgcgcgtgctggatgcctgcgcggcgcccggcggcaagaccgggcacctgctggaactggccgatattgaagtcaccgcggtggaaagcgacccgcagcgcaccacccgcatcgccgagaacctggcgcgcctgggcaagcaagcgcggatcgtggtcggcgatgccagccggcccgccgactggtgggacggccagccctttgaccgcatcctggccgacgtgccgtgctcggcttcgggcatcgtgcggcgccatcccgatatccgctggctgcgccgcgagaccgatattgccaagctcgtcaccgagcagcgccgcatcgtttcgcaactgtggccgctgctcaaaccgggcggcatcctggtctatgtcacctgttcaattttcccaacggaaggcgaggagcaggcgcgctggtttggtgcgcagctggcagatgcgatacgattgcaggcgccggggcagctgctgcccggcacccatgccacgcaagccgccggcgccaatggcgaaaaggacgccactgccggcaccagcctgccgtcggatcacgatggcttcttctacgcccgcttccagaaacgcgcctgatctgatccgatgctgagcacgccgcgcctgtcagacttccgcgtcatggtggacacgaacgtggacactgccgcggaccgggcgtgcctgcatctgcgccccggcggcgcgggcaggcgtggcctgctggcgcggtggtggctggcactggtgctggcgctcgcctcgctactgtggctgccgcccgtcgcgcgcgcgcaggtcatcgaggccaccgaggcgcgcatcgaattccaggacggcggcttcgagcttgccgccagcttcgacttcgacctgccgcccgcgctggaagacgcattgcacaagggcatctccctctatttcgcggtcgacttccagctctcgcgctcgcgctggtactggttcgacgacaagccggtcaacaccacccgcagcgtgcgcctgtcgtaccagccgctgacgcgccagtaccgtgtctccaccggcggcctgcagctgccgttcacgcgcctgaagggcgcgctgcagttcatccagcgcgtgcgcggctggcgcgtgttcgagcgcaatgtggtcaagccgggcgagacctaccacgcggaagtgcgcatgcggctggacctgtcgcaactgcccaagccgttccagatcaacgccgtcaacacgcgtgaatggaacctggcctccgactggcggcgcttcgcctatacggtgccgacggacctgaacgcagcgcccccacctccgctgcccgcagcgccgccgcccgcgccggccccaggccccgcatcgccggcgctgccggcctcgcccgccgtacccgcgcctgcgtcggcgcctgccgctgccattgacgcacgcggcctgaccatgcagacggtgtcgtacggactgtcgcccgcactgctgctgcagcccgcatcgagccagccatgagcaactcgctgtgggacagccggttccggcgcgtgctgtaccgcgtcgtggccgggatcatcgtcttcctggcactggtgctggtgggcctgctggccggcgcatcggccaacaccgaattcttcgatcgctatttcacgctgctgttcaaggtgaacctggtgatcggcgcgctgctggtgctgatcgtgggtgcgctggcgctgacgctgtggctgcgctatcgccgcggcaagttcggcacgcggctgatgaccaagctcgccgtgttcttcggcgtggtgggcgtgctgcccggcgtgctgatctacctggtatcgctgcagttcgtctcgcgcagcatcgagtcctggttcgacgtgcgcgtggaaaccgcgctcgaggcgggcctgaacctgggccgctccaccatcgacagctcgctcgccgacctgcaggtcaaggcacgcctgatggccgagcagctcgccggcgcctccggcgtggccacttcgctgcagctgaaccggctgcgcgagcagtatggcgtccaggaagccgccatcttcaccggcagcggccgcgtgctggccacggcgtccagcaactacgcgtcgctggtgccggacctgccttcgggcgtgctggccgaacaggcgcggctggccggcggctacgcggcggtggagggcggcaccgacccgtcgggcgacggcagcccgagccccgaacgcgtcgacagcagccacctgtaccggctgcgcgtgatcattccgctgggcgccagtccaaccgcggcacaggatgacgccgcaggcggcagcgccccgcgcgcgctggccaagccgccgcgctgggccggctccggcctgtccgtggagcgccgcccggaggaatcgccgtcgagcggcttcggcctggtcggcgagaccgtgcgcgaggaacgctacctgcaggtgctgcaccccgtgccggcggtgctcgcgcgcaatgccgacgaggtccagcgcgcgtaccaggaataccaggagaaagcgctgggccgcaccggcctgcgcaagatgtatatcggcacgctgacgctgacgctgttcctggccgtgttcatcgcggtgatgctggcgctgctgctgggcgggcaattggcgcggccgctgctgatgctgctgcaggggaccaaggaagtggccgagggcgacctctcgcccaagcgcgaactgaaaagccgcgacgagctcggcatgctcacgcagcagttcaaccagatgacgcgacagctggccgaggcgcggctggcggtggaagagaaccgcaccgcgctcgagcaatcgaaggcctacctggaaagcgtgctgcagaacctgaccgccggcgtgctggtgttcgaccgccgctttgtgctgattaccgccaatccgggcgcggagcgcatcttccgccagccgttcggcgcggtgctgggcctgccggttgagcagatccctggcatggggccgttcggcgagatcgtgcgccaggccttctcggaccagaacaccagcgaggtgctgggcggcgccgagcactggcagaagcagatcgagctgccgcagggcgaggaacagccgcttacgctgctggtgcgcggcgcacgcctgcccggcggcgagcgcgatgagcccggctacgtgatcgtcttcgacgatatctccgatgtgatttccgctcaacgctcggtggcctggggcgaggtggcacggcgccttgcgcacgagatcaagaacccgctgacgccgatccagctctcggccgagcgcctgcagatgaagctctcgcccaagctcgaaggcaccgacgccgatgtgctcaagcgtggcgcggccaccatcgtcaaccaggtggccgcgatgaagcgcatggtcgatgacttccgcgactacgcgcgcacaccgcccgcggtgctgcagtcgctgcagctcaacagcctggtggcggaagtgctgcacctgtatggcatcgatgatcccgcggtgcacgagcatccggtgattcatccgacgctgggcaccgcgctgcccgagatcaagggcgatccgacgcagttgcgccaggtcatccacaacctgctgcagaacgcacaggatgccgccaccgagaacgtcgcggccggtagggcggcgccccatatcactctgaacaccgagactgtagaatacaaagattctgccggcgaaaaccggcaggccgtcaagctcaccattgcggacaatggtcccggttttgcgccacgaatcctgagccgtgcgttcgagccctacgtgaccacgaaagccaagggcacgggcctggggctcgcgatggtaaagaagatcattgacgaacacggcgcgcgaatcgagatgcgcaatcgcatggaaggtgcggagatcgtcggtgcacagatctcgatcctgttcgttaaactgacatagtcaacaatggcgtccggtcccggaacgctgcggtggggttaagaggggaagtatggcaacgatcctcgtagtcgatgacgaaatgggaatccgggagctgctctcggagatcctcagcgacgaaggccacgtggttgaactcgcggagaacgcgctgcaagcgcgcgaataccgcgcggcgggtacgcccgacctcgtgctgctcgatatctggatgcccgataccgatggcgtgaccctgctcaaggaatggtccgcgcagggacagctgacgatgcccgtcatcatgatgtcgggccacgccaccatcgacacggcggtcgaggcgaccaagatcggcgcgctcaatttccttgagaagccgatcgcactgcagaagctgctgtccgcggtcgagcagggcctggcccgcggcatcgaacgcccgcgcagcagctcggccaccaccgccgcccccgccacggtcccgtctgccgaacccggttcgtcagacatcgtgcccgagaccactgccgaggccgcccccaacggcagccccgcgcgcgtgcccgaggccgagatgcagttctccttcgacatgccgctgcgcgaagcgcgcgacctgttcgagcgcgcctacttcgaataccacctgctgcgcgaacacggcagcatgacccgcgtggccgagaagaccgggctggagcgcacccacctgtaccgcaagctcaagcagctcggcgtcgaactgggccgcaacaagcccgagccggccgagcaatgaggctgtgacgcacatgacgcttgactgaccaaaaaagtccagttatagtttcgcttctttggcccggtagctcagtcggtagagcagaggattgaaaatccttgtgtcggcggttcgattccgtcccaggccaccagaacaagaaaagcccggctcccgcaagagccgggctttttgctttgtggcatcgcataggcagatttgtgtacaggcagcgctgggccctgtgaaccggcgttggtaacccgccgcgaggtactgaaccatgtcgacgaaacgcaaaatccatatcccatctgatgccgaggacaaggcgctgacgcttgccgcgcgcgcggacgcggacaaccccccgctcaccgcccgggaactggcccgcatgcggccggcgcaggaaatcctgccgagactggtaggggataagatggccctggtcatgctgcagccccgctgccggcgtgcttgaccaacgcgcaacagccaacccagaagtaaatatcttctacttggcagccgatatatgtatctctacgatggcctgacgcgctgccgcccggcggcgcggaccgagccggccaagccgcacccataacgcggacagccggtccagggcttactttcttaccggggggtctgatggatacgttgatcgggacagacaaccgctggccgccgcagactgcgggcgaagagcgcggattgtggaagagcaccatggccgcggccagccacgcgctgggggcggcggggcgggtgcagcaggcggtctcgcagacgctgaagctgcagcacaagatccgcgcgctgcgcgacgagctgcaccagatggaggccgagcgcgacgtctaccgcgagctgcatgcgcgcacggtcgaggagctgcaccaggcgatcgaccgcagcccggcagagatccggcggctgcgtgcggagaccgaggccatgcaggtgcgccaccgcgcctacaagctgctggtgcagcactacatgcgcctgggcacgccgatcgatcccggggtctttgccgagcagcgcagccgcgtgcagcagcacatcctgttccagcgccgcaagggcattccggtggcacagatccgcgtcgaggacatcgcgttcctgctgcgctgaggcgcgctgcagccgtcaagccatgcgctttgccgcgatgggccaggctgcactaacatggcggcagcgatgcatcccgcactcgcatccgacactgccaggccaccatgttcgacatccagaactacaccagcttcgtgctcgccatcctggtgttccagctgatccccggcccgggcacgatcgccattctcaacgccaccgcgcgcaatggcatggcggccggcatgggcgcggtctgcggcacgctgctgggcgaccttgtgtacatgctcgccgcggtggcggggctggcggcggtgatgcaggccaatccgctgctgttccacggcttgcaatggttcggtgccgcgtacctgtgctggatgggggtgcagctgctgcgtacacgctttgccgcggacgccggcgtgcccgagccgcgcaagtccacgcgcgtatacctgcgccagggcttcacggtgagcctgaccaaccccaaggtagtgctgttctttgtcgcgttcttcccgctgttcctgcgcccggatgcgtcgccggccacgctggcggcgatgatggtccacgtcacggtgctcagccttgcctaccaggcggcgctggtgctggcgggcaacgcggtggccagccggctgcgggcgctgccgttcgcgcgcacgctggcaacgcgactggccgggatcgcgctggtcggcttcggcctgcggctggcggccagcaaccggtaacggcccgcggccagcgccgcgattcgataccgcgcgtctgcacacaacaaagcggccacgcattgacgcgctccgtgcacgaacggaacactgtcgcgtccgcgctcaccgcatgtgcgcgggcttgctactgaaccgccaccgttcgaggcgtcgtctcaggcgacgttgtccatcttgccgctgcacgttttccttactgcctttgccgcgatctcgcggtcgctctcgtatcccgttcgttgctccgctttatcgctgccgcgcgccgtcaacggagcgcagcgatgagtacgctcgcacgccgcctggtggccgaaggcctgggcacggccctgctggtggcgatcgtggtgggctccggcatccgtgccgagcgcctcgccgcaggcgacaccgcgctggcgctgctggccaattcgctggccaccggggctgggctggtggcgctgctggtgtcgctgggcccggtgtcgggcggccatttcaatccggtggtgagcctgtcggcgctgctgcagggcacgctgccgccgcgcgatgcgctgcgctatgtgctggtgcaggtggcgggcggagtctgcggcgtgctggccgcccatgcgatgttcggcgagccggcgctggcctggtcggcgcagagccgcaccggcgcggcgatgtggtggagcgagtgcgtggccaccttcggcctggtcggcgtgggcatcggcacgctgcgcagccggccgcagctggtgccgttcgtggtggcaggctatatcatcgcgggctactggttcacgtcgtcgacctcgtttgccaacccggcgctgaccatcgcctgcgcgctgaccgataccttcaccgggatccggccgcaagacgtgccgggcttcgtgctggcccagatcggcggcgggctggctgccacgctgctgttccactggctgtgccgcaaacccgctgcggccgccacggcgcaggccgactggcgcgctgcgcccgccagcgcccctaccagcgccgattgagctgcacgccgaagatcgagccgctcgcctgcgaggcccacgcgtcggccggcgcggtgtagccgatgccgtcgacgtcgctggcacggctataggtgtagaaggcgcgcaggttggcattgccggccgacttgcccagcgtcagcgtgggcgccacggtcagcgcggtgcgctggccgctgacgccgaagccggacgagatctggtcgtgcgagacctcgaagttcaggcggaactggttgctggccacgtaagcaggacgcaagcgcgtggtggtccactgcagcgtgccgaccggcgaccggtcgaactgcaggctttgctccaccgcgccgctcagccctgaacggcccctccattccatcgattccgccacgcgcgtgcgcgacagcgccggtcccatgccggtgtagccggtcatggcgttgcgcgatcccgatccgaactgcaccccgaaccggttggtgccgtacagcacgcctttctgctcatgcaacgcagacgcccaccatgcaccgccggggtcctgcaccagcggctgcgcctccacccgcgtgaagccgagctggatcgaaccctgttcgttggtgttgatgggcgcggtgcgcagcgagtggtagctgggcaggttctggccgttctggtcggcgcgcgcggtgtactggtagctcaggccgatatcgccgatcaccttggcgttgtcgatgccgaagcgcatcgccgtggaattgggcggcagcaggccggacgacagcaggaacggcgcattgtcgcgccggccggcccacatggtggcgccgtccagcaccgccaggccgctgacggcggtatagaactgcggcaccagggcgtagggatcgatcgccgcggggcggccattgaccgtggtggcgtcggtgccgcgcgcctgcgcgatcagcatcacctgcgcgccgccatccaggtccagcaccgattcgcggatcttgacctcgccggcgctgcggcaggccaggccgttgccgatgccggtggaaagcgcgccgccggggcaggcgcgcatggtggccgggcgttcctcggccgcggcgcggccgctgtagccgaggcgccacacggaatccccggcggggtcgtcggcgggcagctgcgagtgcagtaccggcggggcgtccggcggtgtgccaccggtggtgctgtccgccggctcggcgggcgcctcggcctggaactggccgagccggggcgggaacagcaccagtggcggcggcggctggggtggcggttcaggcggtccgacgaagctcgggtcgacagcggggctggtgccggccagggttgccggcgcgctgccgtcaggctgcacgccgggctgggcagccggctcgcccgtggtacctggcgccggtgccgctggcacggtcacgctggccgcgggtgccgcttcgccggcgatcagcgccgccagtggatcctccgtgcttgccgtggccggcgtggcaggctcggcggcttgcgccgaaccagcggtcaccaccggcggcaccgccgggcgcggttcgatgcggggcggcggggtggtcgcgctggtcgtcgcatccccggtctgcgcgcacgcgaccaggccccacgcggccagcacggcaaaaccgaggcggcgcaggggcaggccaccgcgtccggcagggccgggacaaagcgggatggcgggaatccgacgagagactggcggcaattcggacagcaattcagtcaagcaacatcgatggccggagcaggcaagggctccggaggcgggactgttttttatcagccgacccatttgaccgcaagccgggttacaaaatccatcacactgtgcgccgtctcacaatgcgaaaaacccccggatatggcgcgattgactagcgaaaacccgcacttgcgcgataccccgtggcgaaagagccaccgctataatcggctggcttgtctttcgggtaagacagccctttgccgtggcccgcgtccggcgccaggcatgctgggcacgccgccgtgcccgttcgcaacaggcacagcgttgcgcaagccgctgtaccccggcggctggtgcgtcacggtccggcgcgcggcatcatgcaagccgcgagcctgcatccgaatcaatatctataagaggagaagtggagatggaacgtcgttcctttctgttgaaagcgtcggccgtggccgccaccggggcactggccgcgtgcggcaagggtgaagagaaggctgcacctgccgccgccagcgggccggcagcgccggccgtggtcggcagcaacccggccgtggaatggcgcctggcctcgagcttccccaagtcgctcgacaccatcttcggcggttccgaactgctgtcggcccgcgtcaaggaactgaccgacggcaagttcaacatcaaggtctttgccgccggtgaaatcgtgccgggcctgcaggtgctggacgcggtgcagaacaacaccgtgcagataggccacaccgccggctactactacttcggcaagaacccgacgctgtgcttcgacaccacggtgccgttcggcctgaccgcacgccagcagaacgcctggatgatgcagggcaacggcatgaagctgatgcgcgagttcttcaaggaatacaacgtcgtcaatttcctgggcggcaacaccaatgcacagatgggcggctggttccgcaaggaaatcaagaccgtggccgacctgcagggcctgaagtaccgcatcgccggctttgccggcgtggtgctgtcgcgcctgggcgtggtgccgcagcagatcgccggcggcgacatctaccctgcgctggaaaagggcaccatcgatgcagccgagtgggtgggcccgtacgatgacgagaagctgggcttctacaaggtggcgccgtactactactacccgggctggtgggaaggcagcgcgcagctgtcgttctacgcctcggccaccgagtacgagaagctgccggcgctgtacaagcgcgcgctggaaaccgccaccatcgaggcgcacaccaacatgatggccaagtacgacacggtcaacccgcaggcgctggcccgcctgctggaaaacggcgtcaagctgcgcccgttctccaaggagatcatggaggcctgcttcaaggcgacccaggaatcctacgccgacgaaaccgccaagaacccgtcgttcaagaagatctacgacgactggcgcgtgttccgcaacaaccaggccgcctggttcaacgtggccgagcagggcttcgcgcagttcagcttcgcgcgcaagctgtaagcggcacactgccccgggccgcacggggcttgccgcaaaccccatgttccctcgggagcatggggttttttgttggccacggcaggcgggcgcccgccgggcggggatcgcgcggcgccggtagaatcgccggcatctaccggaaatccctatgcaactcggcattctctacgccctcctggcctacatcatctgggggctgctcccgctctatatcaaatcgctgcccggcattgcgccgctggagatcctgctgcatcggatggtgtggtcgctggtattcctcggcctgatcctgacctggcggcaccagtgggcgtggctcggccgggtgctcagggaccggcgcctgctgctgtcgttcggcgccagcgcggcgctgctgtgcgccaactggttcctctacatctgggcggtgtcggccaaccgcgtggtcgatgccagcctgggctacttcatcaacccgctgttcagcgtgctgctgggcgtggtgttcctgcatgagcggctgcgcctggtgcaatggctgtcgatcgcggtagccgcggccggggtggcctggctgacggtggcggcaggccagctgccgtggatcgcgctggggctggcggccagtttcggcggctatggcctgctgcgcaagaccggcgcgctgggtgcgctggaagggctgtcgctggagacgctgctggtgttcccgatggccgcggcggcactggcctggctgttcgcgaccggccaggacagcttcacccacgcagcgccgggtacgcagtggctgctgctgctggccgggccggtcacggcggtgccgctgctgttctttgcggccggcgcgcggcgcattccgctgtcgttgctgggcctgctgcagtacaccgggccgacgctgcagctgctgctgggcgtgtggctgtggaacgagccgttcccggcgcagaagcaggtcggctacgcgctgatctggctatcgctggccttgtatgcagccgaggggctatggatgaatacgcggcagaagcccgctatcatccagtcgaccaatgaaatcaactaaaaatcaactcatttcatttgtcacacgcataactgatacggtgcctggccaccatgtctgccccgcctgatgccactcccgcagtccagcgcaagatcatccattgcgactgcgactgtttctacgcctcggtcgagatgcgcgacgacccctcgctgcgcggccgcccgatggccgtgggcggctcgcccgaccggcgcggggtgattgccacctgcaactatgaagcgcgcgcctttggcgtgcgttcggcgatgccgtcggcgcaggcgctcaagcgttgcccggacctgctgatcgtgcgcccggcgatggacaagtaccgcgaggtctcgcgccggatcttcgcgatctatcgcgaatacaccacgctggtcgaaccgctgtcgctggacgaagcctacctggacgtgagcctttgcacccgccacgccggcagcgccacccgcatcgccgaggaaatccgccagcgtgtgcgcgatgaagtgggcgtgacggtatcggccggggtggggccgagcaagttcgtggccaagatcgccagcgactggaacaagcccgacgggctgttcgtggtcaagccggcggcggtcgatggctttgtcgccgcgctgccggtggaacgcatccacggcgtaggcaaggtcaccgcggccaagctgcggcgcctgggtgccgggacctgcggcgacctgcggccgtggtcgccggaccggctgcaccgcgagttcggcgtcttcggggcgcggctctacaagctgtgccgcggggtcgacgagcgcgaggtcacgcccgagcgcgagcgcaagtcgatcagcgtggaagagacctatgccgacgacctgcccgacctgcaggcctgcatggccgagctggaaccgctcatcgccatgctggaagcccgcattgagcgggctcaggcacacgacaccatcgacaagctgaccgtgaagctgcgcttctctgacttccgccagaccacggtggaatgccgcggccacgcgccggaccgcaccgtctacgcgcgcctgctggccgagggccatgcgcgccggggcttgccagtgcggctgctgggggtgggggtagggaccagcgaccgggatacgtcgcagctggaactgttcgactgagcgcaggattattcgagcgaataatcaacgcaccttaaataatggtgtattgataaatcgcatcaatagccaagctattgcaggtcgttgcgcatcaccagcagccacggcatatgcgaattggtgacgccgtcgagccggcccgaatcgcccagctcgatctcctccatcgacaccgactgctggacattgccgccgatggcacgcaccacgcgcgtggccggatccacgccgaccacgatgtcgcagtgcataggggtggtgccgaagccgatttcggcgatgtcctccagatagcggtcgcgtccgcgcccggcgcagatgatgtcgccgggccggggcatggcggggacgggctcgatatggaaggctggcctgggcaggatgccgtcgcgggcatcgaccacgtacatcgagtgcgactgcccggtcaggaactggcgctcgtccagccccgccttgcgcagcacccatgagataaacaccgccgaccaggcccaggatccctgcgtcacctgccggcagccgggcgcttcgccgacgatgccccagtagcggcgcgccagcgagcagcccaggggcgtggcttccatgccggtgccgtccggaaaggacaggcagctggcggccggtggcggattgccgttggtcttggattcggtatcggtggtggcggcagcgggtgccccggcctccgcgggggacggtggctgggcctccgggatctctggcagtggcgcaggcagttccggtgcgggcaccgggctgtaggtgacgcaggaggtgtcgtcccggcccagccgcaccacctgcccgccccagcgggcccattcctgcgtggcgatctcgacgatgcgttcgcgcggcgtggcgcccgggcgcgtcaccggcctttcggtgtcgggcagcgcgcgcgcctgcggccgcaccggctcgctgacggtggtgcaggcactcagcagtgccagcgccacggcaacacaggccgcgcgcatggtgcctgcagcctgtggagaaagctgtggaaccggctgtggaaagcgctgtgcataacgctgtggagatctgcggcgcggcggacgggcaagcatggaggccccatgtggcacggcacccggtccggcctgtcacggccacggctggacgcctgttggaagacttcgcgcgcgatcgctccggcgacggattcagcgatgcggcggatactgcagaaaatcagcttaccgctgtggataacgtcccccgcctggcgctcgccagcgccctcgggcaccgggcggcggcatggcggggtctgacaattcgggccctgcagtgcagcccgtcaggctcactggttgacagcgtccttgaacttctggccagccttgaacttcacggtcttggctgcttcgaccttgatttcttcgccggtacgcgggttgcgcgccatgcgctcgccacgctcgcccttgctgaacgtgccaaagccgatgaggctcagcgtttcgcccttggccacggcgtccatgatggccgacagggtcacgttcagtgcctgttccgccttggacttggtcagaccgtccaccccggctgcgatagcgtcgatcagttcggttttcgtcatgcttcactccgtatcgagttgataaaacacaggcgtccgcatgccgggcggcctgactggcaccgctccggcaaagacaccgcgggccacatgataccgtgtcggacaaggcgcaccgggaacagattgttacctggcagtttccgcgaggccgcgccaggctgggcttcgcggcaaatcgacgcagctgggtacagccatcgcaagccgcggaaggtgacgaaagcgtcctaagctgacaggcaggggcccccaggtcgcgcaggcgagatagcgggcgggccgcgtacctagcctctcacccatccctcgccagaggccctcagaggccctctgcccacgcgcaggcgcattggacagggctggagagctactgacggccagaaacgcttgcaggcgctctggcagcctcggaggcgcagactgcactatgttgcatgttgtcggatcattgggctggcggcgaacccagccgctattcggcgcatgcatggcaccttgccggggcggtttacgaaccggctccagatcctgcgggcggcgtatacgtgaaagtcggtgtggttgggcgtatacgcccgaggtatacgccgaatcttcaaatccaaaaccacaaagcttcgcgctatcgcgacgtttacagtcccggccatttggatgatgccttgggggcattcttttgctgacgccgttggttcgttctttcggtttaccttcttctttcatgtatacaaatagtagtagtaagtaaacacccgcccccgctgtggaaaaccacgtaaacgtctttcggttcaacggtttacgtaaacgagaagtggtcgtatccaatgttggtcgaggtggatgactcaaccatccggaggaggccagtgccgcaagccctccgacttatgcctgaggcatccccatgccagccccaggcagcccacatccaatccgcgtgcttgtccacagttcgaggcggggttatccacacgcggggacgtaaacgggcgtcgcggctgaggcggaaatggggtgccgtatacgtgtcaatcgcaaccagggcgtatacggtgaggtcgccggaaaggggtgttacgtatacgtgtcacggttgcaccggtatcatccccgatcgcgccggaacggccggcacagcgggccactcaggcaaacaggcgacgagcacggaaaggcaaatggcggacaaggcaaagcgcaaggcagcggacgagggcaagaagaagacggcgagcgaccggatcgaggtgcgccagtcaggcgtgcacggcaagggcgtctatgcgatcggccagatcgccgaaggcgaacgcgtgatcgagtacaagggcgagcacatttcgtggaagaaggcgctggagcgccatccgcacgatcccagcgatcccaaccacactttctacttcagcctggacgacggcagcgtcatcgacgccaagtacggcggtaaccgcgcgcgctggatcaaccacgcctgcgaacccaactgcgaagcgcgcgagaaaaagggccgcgtcttcatccacgcgctgcgcgacattgccgagggcgaggagttgttctacgactacggcctggtcatcgacgcgcgctataccgccaagctgaagaaggagttcgagtgccgctgcggcagcccgcaatgccgcggcaccatgctggcaccgaaagaaaagaagaagaaggccaagtaaggcgcgcgtcccaacccgcgcctccgccagcgcagcggcgggttcaggccaccgatcctggcggttcgcaggggatccggatcacgaagcgcatggtcggccgccgttcgggcgcgccgtccgcggccggggtatcgccggccgcacctggaaccggcggcacgtcctcgatgcggatggtgccctggtgcagcgtcacgatctcatggacgatggccagccccagcccggcgccgccgctatgggccgcccgcccgccgcccggctcaggggcgcggtcgccgcggaagaagcgcttgaagacttcctcgcgccgctgcggcgggatgccggggccgttgtcttccaccatcaccaccgccatgccgcggtgacccatggcctcgccgccggcgcgcaccgtgatgcgcccgcccgcgggcacgtacttcaccgcgttgtcgatcaggttggacagggcctcgcgcatcagcagccggttgccgcgcaccaccgcgggcgcgctgccggtgaaggtggggccgggcaggatctcgaagcccaggtcgatgcgttgcgccagcgcctgcggcacccactcggcgccgatctcgaaggccagctcggccaggtcgaagtgttccaccggcccgagacgctccagcgacagccccggctcggcgcgcgccagcgacagcaactggttggacagccgcaccgcgcggtcggcggcggtctgcacctcgcgcagcgcatgccgggcaacttccagcgaatcggcttcctgggcccggtcggcatgcagcttgaccgcggtcagcggggtgcgcagctggtgcgcggcatcggcaatgaacttgcgttgcgcgtcgagcgcgtcgcgcagccgcgccagcagtgcattgaggccgcggatcagcggcgccacctcggccggcacctgggtctcgtcgagcgcggcgagtgagcgggcagtctgccggttgagcttgtcggccaggatctgcagcggcaccagctcttccttgagcacgtgcgacaggatcaggctgccgaccagcagcagcaggatcagcggcaccgacaccgacagcaggatctcgttggcggcggtctcgcgccggtccagcagctccgccacctccaccacgatcggcccgcgcgcgggtttgccggcctcgctggtgccgagttcgtccaccgcggcgctgggcagcatcaccggcagccgcaccgcgcgcacctggcgtccgctgaaccaggcgtagaacaggcgcgcatcgtgcagcgtggtctggccggtgccgtagcccagccaggtgtccatgccgccgatcagcccgtcggggccatggatgcgccagtagatgcggtcggtgccctcggcctcgaccagcgtctgcgcgatcatcgggatgtcgtgctccaggcgcgggccggcaatgcggatctgctgggcgatgttgttggccacgccatacagcgcgcggtcgaatacctgcgtggtgtagtgcgccgccagccagtacgacagcgagccgctggtcagcaccagtgcaaacagcggcgtggccagagcgcgcagcaggtgcgcgcgcaggctgatgttggagccggggcgggacgcctggcgcgtcgccgcgggggtgtcgccggcggcggaggccgggggcacgttccgcgttgcgatgcgggaggccgtgcgccaggaaacccgggaggaggtgcgggagcgaggccacattgccggctaggccgaagggcagggccgcgtgtcggatgaccgtggcggccggagcggtttcattgtccggcgcggatctgcagcaggtagccgaagccgcgcacggtgacgatctcgacatcgctgtcctcgagcttcttgcgcacgcggtgcacatagacctcgatcgcggtgtcgcccacggtgtcgccgccttcgccggcggggtgggcaaaggtggccaggtggtcctgcagctgcgccttgctgaccacgcggccctggcgctgcagcagcagttccagcaccgcgaactcgcgcggcgacagctccagcgggcgggcgtcgataaacatgcggcggtcgttgcccgacagccgcaggcgccccaggcgcacgtcgcgctcgggggcggcctcgccgtgctggctgcggcgcagcagcacgcgcacgcgcgcttccagctcgggcagggcgaacggtttgatcaggtagtcgtcggcgccggcgttcaggcccgagagcttgtcttccagctcgtcgcgcgcggtcaggatgatgaccggggtggtgcggttgcgggcgcggtagcgcgccagcagggtcatgccgtcgatgccgggcaggcccaggtcgaggatgaccaggtcgtgctgctcgcgcagcaggtgttcggtggcatagacgccgtcgtggacgacgcgcatctggtggccagcgcgggacaggccggcttcgacgccgctggcaatctggcggtcgtcctcgatcagcaggatacgcatggcggcagctcgggcaggaagttgggcatggctggagggaaggcctcttggcgcacacgggaggtgcgggcctgccgcagattgtactaggcgcgggcctccgcttccttacggattgcctacagcggcccgatccggcgctgccgccgcgcccgcgcttagtcggtcaccgcgtcggcggcgcgctcgatgaagtgggccaggtcgatatcgcgctgggtcaggccgttggcatcgtgcgtggacagcgtgatgtcgacccggttgtagacgttgaaccattccgggtggtggtcggccttctcggcctggatcgccacgcgggtcatgaagccgaaggcggcattgaagtcatggaaggtgaagcgcttgaagatcgcgtcgcggtccgggacggtggtccagccgggcaggtctgccagcagcgtggcacgggcttgcggggaaagcggagtcatagggggctcgatctggtcgtaacgaaaacgaaggccgcaaatcaatgcggacagccggcccgcccgcgccgtggcggcgggcatgccggcattgtttcacaaagcgggaagcggggcagggcgccccgggtttgccggcaaggggccggatcagatgtcttcggtatcggcccagccttcgcgggtgccgacattgagcacctggtcgcccggggccacgtcgcccgcgcccagcgtcggctgcgcgcgcagttcttcgtacagcggcgcaaagtccggccgggtggcgtcgaacagctgttcgaagctgtcgatcacgaagtaggtcttctggaaggtgtcgatgcggtagcgcgtgcgcatgatgcggcgcacatcgaagccgatccggttggggctggccgaatccaggctgtagatcgactcgccctggctcgacaggatgcccgctccgtagatgcgcaggccctgcgcggtgcggatcagaccgaattcaaccgtgtaccagtacagccgcgacagcatgtccagcgcgcccagcccgttcgccttcaggccgcccttgccgtaggcctccatatagtcggcaaagaccgggttgatcagcagcggcacatggccgaacacgtcgtggaagcagtccggctcctgcaggtagtccagctgctcgggcttgcgcatccaccagctggccgggaagcggcggttggccaggtgctcgaagaacacctggtccggcaccaggccgggcacggccacgacctgccagccggtggcgcgcatcagggtttcattgagctggtcgaaatcggggacgcggtccttgtccatgcccagcgtggccaggccctgcaggaattcatcgctgacacggccctgcagcatcgcggcctggcgctcgtacagcttgcgccagatggcgtggtcggtgctggtgtagcggtgcactggctgggcgatggtgaagtccgggcgcagttcctggccggacagcaggccggcgtcgaactgttccttgagcttgtcggtcagggtgccctggaaggcgccgggggcttcggtggccgtggcgatggacataggtgcgcgtctccttgtaatgcgtgcttgctgcatcggtggcagcatcaatgcggatttactgcgtagtttagacatccaggcgcgcagaaaggccgcaaaatccgcttttattggtgttgtgacgcatataatgtgcattattcaactgaagaatgcgggatttgtgtatgactgcctccggcgtctccctggaccccttcgacctcgcgctgctggccgtcctgcaggccgacggccgcaccacccaccagcagctggccgaacgcgtgcacctgtcgcccagccaggtcgggcgccggctggcgcggctggaagccgacggcgtcatcaccggctaccgcgtcaacctgtcatcgcaggcgctgggcctgggggtgatggtctttatcagcgtcaagctggcccaccatgccgacaccatcatcgaacgcttccgcgaagagatcctgctgctggaagaggtgcaggagtgctattcggtggccggcgaggctgactacctgatccgcgtggtcgtgcccgacctgcccacgctggccgaattcaccatgaagcggctgatgcgggtgccgggcgtggaaagcgtgcgttcgaacatcgtgctgaccgcgatcaagtgcgacggcccgctgccgctgtcgcacctgcgctgaatcttttcctgcggcgcgttgcaggtttgcgtgccggtcttgcgctcctgtggcgtgcgtgtcaccctcgccgggtgccgcaaacgtggcgggaacggaggatggcaggatgaagggaatcgtcgcccgagccgatcggggtcttggcaggatgccaatgcaattgcatgcgcggcgcgcagtcctggccctggtggccacgcttggaatcctggcagcgggcggcgcgcaggccgcgcaggtgacgcgcttctcccctgaaggcacggtcgggcaggtgcggcaggtggcgatccgctttgacgaggccatggtgccgatgggcgacgtccaggccaccgcgcccgcggcggtttcctgcaccggtgccggcaccggcgggcaggcccgctggatcgatgcgaagaactgggtctatgactttgccagcgacctgccgccgggagtgcgctgcaccgtgcgcatgcgcaccggcctgcgcagcgtggccggcaccgcctatgccggcaagccggagtaccgtttcgagaccggcggcccgacggtcgtgtccagccggcctgcgggcggcgagatcgaggaagaccaggtctttgcgctgcgcttcaatggcgccgccaccgcggcctcggtgcgcgagcacgcctggtgccaggcgcaggggctgggcgagcgcatcccggtgcgcttgctcgccggcaaggagcgcgatgccgtgctcgacgccatccactgggaacgcatcgccaagcaggcgcccgatgccgtgcacctgcttgcctgtcagcagcggctgccggccgcggcgcgggtgcaactggtgctgggcgcgggcattgccacgccctccggcgtggccacgcgcgacgagcgccgctttgactacaccgtgcgcgaacccttcaccgccagcttcagctgcgagcgtgaacacgcgcagtcgccgtgcacgccgctgcggccgatgtcggtcagcttctcctcgccggtgccgcgcaagctggccgagagcgtggtgctgaagacgccgtccggcccgcgcgcgccgcagttcgatcccgacctggcgccggacgccagcgtcagcgcgctgacctttgccgcgccgttcgcggagaaggcccagttcaccatcgaagtgccgcgcaacctgaaggacgacagcggccgcacgctggccaatgccgacctgttcccgctcaaggtggccacggcatcgatgccgccgctggccaagtttgccgcggcgccgtttggcgtggtggaacgcttcggcgagctgccgcgcggcaaggcgccggccgactacccgccgctgctgccggtgacgctgcgtaacgtcgaggctgacctcgccgtgcgcggcgtgcaggccagggccggcaccgtgatgaagctgcgcgtggacgacgacactgccgtgatgcagtggtttggcctggtgcgccgcatgcatgaggccagctatacccgggccgagctcgacgccgtgctggcgggccgctccccgtatcgagtcaacaacccgcgcaatgccgtgtcgatcgagacgcgctcggtgtccctgctcgagcgcgcccccggcgtgcagaagctggccgtgcccaagccttcgggcgatgcgccgcggccgttcgaggtggtgggcatcccgctgccggaaccgggcttccatgtggtggagatcgcctcgccgatgctgggcgagtcgctgctgggcaagcgtgcgccgatgtacgtgcgcaccgcggcgctggtcaccaacctgggcgtgcatttcaagctcggccgcagcgccggcaatgaagacgatggcagccgcagcgggctggcctgggtcaccgcactggacgacggcaagccggttgccgatgccgccgtggcggtgcgcgactgcagcggccgcctgctgggcgaagggcgtaccgatgccagcggcgtggtgcgctttgccaggctggctgccgcgcccgagggcgcctgcgagcagaacgggctgtcgggctatttcgtctcggcccgcatcggcgtcggccacccgcaggcacgcggcaaggccgacatggccttcgtgatgtcggactggaaccgcggcatcgagagctggcgcttcaatgtgccgaccgacaccggcaccgcacccacggtgcgcgcccacaccatcttcgaccgcacgctgctgcgcgccggcgagaccgtgtcgatgaagcacgtgatccgcgccgagaccgcgcagggctttgccctgccgccggccagccgaccgctccccacgcgcgtggtgatccgccatgaaggcagtggccagacctacgagctgccgctgcaatggcgccagaccgcgaccggcgggcgcagcgcggaaagcagcttccaggtgccggcggcggccaagctgggggtctacagcgtcgagctggaaacgcagaagggcgaaggcgcgcaggacaatggcggtgcgcgcggctacaccagtggcagtttccgggtcgaggcattccgcttgccggtgctggccggcacgctacaggtggcaggcaaggcggggcccatggtggcgcctgccgaactgccggtcggcgtggagatccactacctctccggcggcggtgcggccgggctgcccgtgcgcgtgtccgcgctgctgcgcgacaagtacgtcagcttccccggctatgacgagttctcgttcaacccgccgcgcgcgcagcgcgaaagcgccagcggcgacgaggagatggatgaggacgagcagggcgatgccagtgccgacagccagaagctggttgccgacaagctgccggtgacgctcgacaagaacggcaacggcaccgtcacgctgcgcaagctgcccaagattgaagccccgcgcgacctgctgctcgaagccggctttgccgaccccaacggcgagatccagacgctgcgccagaccgtgccggtgtggccggcggcggtggtggccggcatccgcaccgatggctgggtctcggtcaagcagaagctggccgtgcacggcgtggtgctggacgtcaacggcaagccggtggcggatgcgccggtcaagatcaacgcgcgggcacgcatcaccacctcggcgcgcaagcgcgtggtgggcggcttctaccgctatgacaaccgctccgaaacgcgcgacctcggcaccgtgtgcgagacccgcaccgatgcgcagggccgtgcgcgctgcgacgtggcgctggagcaggccggccagatcgaactggtggcgagcgcgcgcgacaaggacgggcgcaccgcgcaggcggcctcgacggtctgggtcacgcgccagggcgagctctggttcggcggcgagaaccatgaccgcatcgacctgctgccggagaagaagtcctacgcgccgggcgacaccgccgtgttccaggtgcgcatgccgttccgccatgccaccgcgctggtggcggtggagcgcgagggcatctaccagacccaggtggtggaactgcatggcagcgatcccaccgtgcgcgtgcaggtgaagccggagtgggggcccaacgtctacgtgtcggtgctggccttgcgcgggcgcctgcatgaggtgccctggtattcgttcttcacctggggctggcgccagccgggcgagtggtggcgcgcgttccgcagcgagggccgcgaatacgccgcgccgaccgcgctggtggacctgtccaagccggccttccggctggggctcgccgagatccgcgtcggcaatgcgggccaccggctcgacgttaccgtgacgccggacaaggccagctatccggtgcgcggcaaggcgcgcgtggcgatccaggtgaagctgccagaaggcaagcccgccgccaacggcgaagtggcgctggccgcggtggaccaggccttgctggaactgatgcccaacaccagctgggatctgctcgatgcgatgctgcagcggcgcggctacggcgtggaaacgtcgaccgcgcagatggagatcatcgggcgccgccactacgggcgcaaggcggtgccggcgggcggcggcggcggcaagagtcccacgcgcgagctgttcgacacgctgctggtatggaacccgcgcgtgcagctcgacgccgagggccgcgccagcatcgaggtgccgctcaacgattcgttgaccagcttccgcatcgtcgcggtggcggacctcggcctcggccgcttcggcacgggcagcgccaccatcgccgccacgcaggacctgcaggtgatttccggcctgccgctgctggtgcgcgaggacgaccgctaccgagccatgttcacgctgcgcaataccaccaggcgcgcaatgacggtgcaggccagcgcgcgcggcacgctgctcggcaatgaggccagcctgccggcgcagaccgtgcagatccctgccggcgaagcgcgcgagatcggctgggacgtgaccgcgccagcgttgctggcgtactcacgcagcggcaccgtgatgtgggaagtgcaggcgagcgagcagggcacggggggcgcggccgaccgcatcaaggtgtcgcagcagatcgtgccggcggtgccggtgacagtgcagcaggccacgctggcgcaggtgtcgccgtcgctgtcggtgccgctcaaggcaccgccgggcgcgctggcggatcctgcgggcaaggtgcgcggcgggctgcaggtgaacttccagtcgtcgctggcgggcggcatgccgggcgtgcgcgagtggttccgcaactacccgttcacctgcctggagcagcgcgcatcgaaggccatcggcctgaacgacaccgccgcgtgggacgcgctgatgacgcagctgccgtcctacctcgatgccaacgggctggcctcgtacttcccgctgaacgccgacggcgacttcggcagcgaagtgctgaccgcctacctgctggcggtcaccgacgaggccgcgcgcgccgggctggcgctgcgcatccccgacgcgcagcgcacgcagatggagcgcgggctgaccgacttcgtcgaaggccgcatccgccgcgacagctgggccccggtggccggcacgcagtacctggacgcgcgcaagctggccgcgctagaggcgctgtcgcgcaccggccatgctcaggcgcgcatgctgggctcgatccagatcctgccggcgcaatggccgacctcggcgctgctggactggaccctgctgctcacgcgcatgcaggacatcccgcagcgcgagcaacgcctggccgaggcgcagcagctgctgcgctcgcgcctgacggtgcagggcacgcgcctggcgttctccaccgagcgcaacgacaactggtggtggatgatggccggcggcgacaccaatgccgcgcgcctgctggcgctggcgtcggaactgccgggctggaaggaagaagcgccgcaactggccaccgggctgctgggccggcaggtgcatggtgcctggggcaccaccactgccaacgcgtggggcatgctggcggtgacgcgcttctcgcaggcgttcgagaagacaccggtggcgggcaccacgcgggcgagcgtgagcaatgcggccgacgcctcgcgcagtttcgactgggcgcgcgcgcagcgcaccgacggcgtggcccagggcagcctcgacctgccgtggccgaccggcgccgacggcggcacgctgcaggtggagcacgccggcgccggccatccgtgggccacggtgcgggcgctggcggcggtgccggtgaccgcgccgctggccgcgggctaccgcatcaggcgcaccgtgacgccgcaggagcaggcggtgcagggcaagtggtcgcgcggcgatgtgtaccgcgtcaagctggagatcgatgcgcaggccgacatgacctgggtggtggtcagcgatccggtgcctgccggcgccaccatcctcggcagcggcctgggccgtgactccacgatcgccacgcgcggcgagcggcgcaagggcgcggcctggccggcctacaccgagcgcacgccgcaggcctaccgcgagtacttcggctacctgcccaagggcacggtatcggtcgaatacacggtgcggctgaacaacgccggcgacttcgcgctgccgcccacgcgcgtggaagcgctgtacgcgcccgacgtgttcggtgtggcgcccaatgcgcggctggcggtgggggcgcgcccatgagctggctggcaatgatgatgccggcacgcgtgcgcgagtggtggctcgcgggcacgctggccggcatcatctacggcgcgctgctggtgcaggtggcgatcgagctgcctgaaggcgcgccgctgaccgggcatatcgccatgcagcccgcgtggaagaccgcgatggcgctgctgctggcacgcgccgcgtggttccaccggccgctggttgagcgccgctggctggtcactgcgctgctgttctcggccctgggcgacctcctgctggcgctgccgacgctgacgttttcgttcatgggcgggcttggcgcctttttgctcgcgcacctggcctacctgcgcgtgctggtgccgctggcgggcgacacgcgtccgcaccggctgattgcgtgcggcgccatgctgggcgtggcgggcaccatgctgggccgcttctggcccaatatgggcccgctgacggtgccggtggcggtatacgtgggcgtgcttgcggcgatggcctgcagcgcgctggtggcgcgcctgcccacgccgctggcggcgctgggggcgctgtgctttgccgcatcggacatgatgatcggcatcgcgcgcttcctggtgccgttcgaatctttccagcttggcatctggtggacctacgccgcggcccaggtgctgctggtggcgggcatcgtggcgggacgcgagcaggcatgaagcagcgctgtattcgcatggtgctggcgacggcgttgatctggtccgcgccggccatggcgctgccgtccttcgagcaagtccgtaccgactggcgcagtgccgacgtggtggtgctggaccgccacggcgataccgtgggccgcgtgcgcgacgacttccgcgcgcgccgcggcgactgggtcgcgctggccgatacctcgcccgcgctgcgcactgccatcgtgctgtcggaggaccggcgcttctatgcccacagcggggtcgactggcagggcgtggcggccgcggcctgggccaacctgtggaacacacgcacgcgcggcgcctcgacgctgaccatgcagctggcgggcctgctcgatgaggacctgcgccggccgggcgcgccgcggcagggccgcagcttgacgcagaagctggggcaggccgccggtgcggcggcgctggagcgcagctggagcaaggaccagatcctggagggctacctgaacctggtgccgttccgcggcgagctggtgggcctgtctgcgatgtcgcaggtgctgttcggcaagtaccccgaagggctcaacgcgagggaatcggccctggcggtggcgctggtgcgcgcgcccaatgccaaggccgcccaggtggcaagccgcgcctgcggcatcctgcgcgagatgcgcctgccgcgcgagtgcgaaggcctggaaggctttgcgcaactggcgctgctgcgcaccgggccggtcgcacagcgcgccgcggccgccacgccatcggcggcgttgccgcagctggcaccgcacctggcaccgcacctggcacggcgcctggtcggcgaagcgcgctcgcaactggccgcgggcgtacccatgcctgcgcgcatcgcgtccacgctcgatgcccgcctgcagcgcgaggctgccaccagcctggaccggcacctgcgcgaactggccgggcgcaatgtcgaggacggcgcggtggtggtgatcgacaatgccagcggcgacgtgctggcctatgtgggctcgtcgggcacgctgtcaggcgccgcgcaggtggaccacgcggcggcgctgcggcaggcgggctcgacgctcaagcccttcctgtacgagcaggcgctggaagagaagcggctgaccgcggcttcgctgctggacgaccggccggtgaacctgccggtcggcggcgggctctacgtgccgcagaactacgaccaccgctatgccggctgggtcagcctgcgcgcggcgctggccgcgtcgctgaacgtgcccgcagtgcgcacgctggtgatggtgaccccgcaccgcttccacaagcggctggtggcgttggggctgccgttgaccgaggccggcgactactacgggttcagcctggcgctgggcagcgccgacgtgtcgctgctggcgctgaccaatgcgtaccgggcactggccaatggcgggcgctacgcgccgccacggctgcgggaaggggcgccgccagccgcatcgatgacagtggtgatgcaaccaggcgccagctacgtgattgccgacatcctgtcggaccgccatgcgcgcgcgcgcaccttcggcctggacagcccgctcaccacgcgcttctggaccgcggtgaagaccggcaccagcaaggacatgcgcgacaactggtgcatcggctggtcgcagcactacaccgtgggcgtgtgggtcggcaatgccagcggcgccagcatgcacgaggtctcgggcgtatcgggcgcagcgccggtctggcacgacatcatggaagcgctgcaccgcacgcgcgccagccacgcgcccgccatgcccgacggcgtgcagcgcgtggcgctgagcttcgacgacgggctggagccggcgcgcgatgaagtctttctggccggcacggcgatccggcgcgtcagcgtgagcgcacccgccgcgcgcccgaccgcacccgtgatcgccaatcccgccgacggcaccgtgtttgcgctggaccccgacatgccgcccgcggcgcagcgggtctggttccatgccgagggcgtggccggccagaccgcgcgcacggtcagctggcgcatggacggcaagccgctggggcgcggcggcgaggtggcatggctgccgtggccggggcggcaccaggtggagttgctcgatgcgtctggcaaggtggtggaccgcatcggcatcgaggtgcgtggcgcgtcagtgcgcgcgccggtgccagcggccaaacgctgaggccgctggcgctctgtgcgcaataatggcgcttcgcaacgtcttgccggagccagcgcatgtccctcgtccccctcgatgccgccagcacggcggcgcgcctgccgtatcccgaactggcgcaagccatcgccgacatgctggccgagctgcgcgacggcaccgccatggcgccgccgcgcattgcgctgccggtgggcgatgcgcaagggggcgaaggcacgctgctggtgatgcccgcgcgcaaccgcagcctggtgatgaccaagaacatcaccgtccatcccggcaacccgcggcgcgggctgcccaatatcctcggcgaggtggtggtggccgacgcgcacaccggcgcgcgcatcgccatgctcgacggccccacggtgacgggacggcgcactgcggccgtgtcgctgctggcggcgcagtgctttgccgcgcgcaaggattgcgagttgctgatcgtcggcgccggcgtgcaggcgctgacgcacctggaggccttcgtggccgggctgggcgtgcgcaaggtgtggctgcattcgcgcacgcgcgacaaggccgaggcactggccgcgcacgcgcgcacgctgggcgtggaagcgcaggtagccgagtcggtcgctgcagtattgcctcgtgtatcgatggtggtcacggtcacgtccagccgcagcccggtgctgccggacctggacagcggcctctggcgcgacgatcacttcattgccgcggtcggtgcgttccggcccgacatgtgcgaactgccgccggcgctgtgccatgcggccgcggatagcgggcggctgctggccgataccctgttcgggatcgaggacgaagccggcgacctgctgcaggccggcatcgactgggccgacgtgcagccgttcgagaccgcgatcctgcaggccgatgccatccgtgcgcgggccggcagcccgctggtgttcaagagcgtgggctacgcgctgtgggacctggcggcctgcgtgctggccagccgcgggtgactaacccgcgccatcgcgggcacgcagccagtcgctgaaaagctcgcgcgccggtgccaggaagccggcgatcggttcgctgcggtcgctggcataccagtggcagtagcagccgtggatggtcgccaccatcaggcgcgccatcggcgcgggcagtgggcgcccgggggcggacagcgcatcgaccaggtcctgcacatgcgcgtcccagctgcggcggatctcctcgcgcacgttgggcggcacgctgcctgagaacagcaaggccagcacgacacccttggcttccggattggccgtgaaatagtcggccacccggtcgaaggcgttttccagccgccgcgccgcggtcttgccccggtgcggctccgtgccgagctcctcgccgatatcccggaacaggctggttgcggcctccgccagcagcatttccttgctgccgaaatgccacaacaggctgctcttggccacgccggcctcggcggaaatctggtcgagggtcacctcggcgtagccgtgtgcgctgatcagcccgcgcgtcacggcaaggacgcgttcccgggtttccaggccgcggcggttcttggtgacggaggctggaggcttttgtgcggccgggcgggtcggtggcatgggcgggggcggaagacaggtggtgccggcagcaatttatgagtattcgggccggatgcctatttgacagcggccggggtctgccagcaaactccagtattgtactgaacgttcagcacaattacggaagtgttgcaggccggatacggacatccggcccaggatttccaggagaccaggatgtcgtacccgactgccattgccgccgccgccgccgcgctggctgcagccgccatcagccttgccggcaccgccggcgccgcacctgccccggccaccgcgggcaatcccgccaccgatgccaccgcccgtgccaatgcggccgtgctgcaacagctgccgttccaggaccggcgtgacttcgaggccgcgcgccgtggctttatcggcacgctggataacaccgagatccgcgatgccaagggcaatgtggtttgggcgctggccccctatggcttcctcaagcaagaccgggcgccggccaccgtgaaccccagcctgtggcgccaggcgcagctgaacatgcacaacgggctgttccaggtgacggatcggatctaccagatccgtggcttcgatatcgccaacatgacgatcatcgagggcgataccggcctgatcgtgatcgacccgctgacagcgatggagacctcgcgcgccggcctcgacctgtacttcaagcaccggcccaggaagcccgtggtcgcggtgatctatacgcacagccatggcgaccacttcggtggggtcaagggcttcgtcagcgaagacgacgtcaaggccgggcgggtcaaggtgctggccccggaaggtttcatggaagaggccgtcagcgagaacgtcttcgccggcaacgccatgagccggcgcgcgcagtacatgtatggcttcaaccttccgcgctcggcaaccgggcaggtggatgcggggctgggcaagggggtggcgcacggcacgctgacgctgatcccgccgacggacctgatccacaagaccggcgagacgcgcaccatcgatggtgtgcagatcgaattcctgatggcgccgggcaccgaggccccggccgagatgctgatgtacttcccgcagtggaaggcactgtgcgccgccgaggacgccacccacaacctgcacaacctgtacaccatccgcggcgcccaggtgcgcgacgccaaccagtggtggcgcgcgctggacgagaccatcgaccgcttcggcggccgcaccgaggtcctgttcgcccagcaccactggcctacctggggccgccaggacatcgtcacttacctgggcaagcagcgcgacggctacaagtacatccatgaccagtcgctgcggctggccaacatgggctatgtgccggccgagatcgccgagcgcgtgaagctgccgccgtcgctggccgccgaatggcatctgcgcgactactacggcaccgtcagccacaacgccaaggcggtataccagcgctacctcggctggtatgacgccaaccctgccaacctgaacccgctgccgccggaagaggcgggcaagcgctatgtcgaattcatgggcggcgcggcgcgcgtgctggagcaggcgcgtgcggcgtatgcgcgtggcgaataccgctgggtggccgaggtggtcaagcacgtggtctttgccgatccgtccaaccaggctgcccgccggctggaagccgacgcgttggagcagctcggctaccaggccgaatcctcgacctggcgcaatgcctacctgaccggtgccgccgaactgcgcagcggcccgccccaggccggccgccgcgccggcagcccggacgtgctgcgcgccatgaccgacaccatgttcctggactacctggcgatcagcctgaatggcgaccgcgccgcgggcaagacgctggcgctgaactgggtacagccggacaccggcaagcgctttgcgctgacggtggagaacggcgtgttccgctacaagcccgacgcgcagcacgcgtccccgcaggccacgcttaccatgccgcgcgccgtgctgatgggcgtgctggccggccagaccacactgcaggccgagacccaggcgggccgcgcccgtgtggacggcgacccgcaggcgctggcgacgtggacggcgctgatggacaagtccgagccgaacttcagcatcgtgacaccctaaccgcaccgagatggggcaggcgcgcggccactgttgcgtgcccgccctataaaaccgctcttgcctcagggttttttcctgcgcgcggcataaaccgttgtgcggatgcctcggtgaacggccctgagagccgctcccatgctggtttcttagtggttaaccctccctttagggggcgtcctctacgaatcagtgtcatcggtgaaacagtcgtgctccggctggccggataatgcacacggcagtaaccgaaagaggagtaagaggattatgaaatcgacctataagaagatgctggcggcaggcgctgtcatggcgctggccggagccgcacacgcgcagtccgccggcagcaatatcgtcagtctgggctggttccgcgtgatgccgaacagctccgccgatccgctgactgtcgacagcatcaacggccgcccggtcggcatgacccggccgaacaccggcgcggagatcgaatctgccgacacgctgggcctggccttcacgcacttcttcaccgacaacatctccggtgaaatcgtcgcgggcattccgcccaagcatgacgtcaagggcaccggcaactatgcccagtatggcaagctcggttcggtcaagcagtggagcccggcgctgctggtcaagtaccacttcttcgacgccaagaccaggttccgtccctatgtcggcatcggcgtgaactacacctggttcaccgacgagaccatcaccaaccagaacttcgtgaaccgcgagttcttgccgggtgcgcgcatgaccgccagcgccaagccgtcgtggaacccggtcttcaacatcggcgccaactacgccatcaacgacaactggttcgtcggcctgtcggtctcgtacgtgccgctgtcgacccgcgcgtccttcaccacgcaggcgggcccggtaacgatccagtcacacaccaagatcaagatcgatccggtggtgaccttcctgaacgtgggctaccgcttctgagcgcggcacactgacggcagaaagggcacccgggggtgccctttcttgttggcgccggctgcggtggccagcttacgccaccgacttgaccggatagccggcctcttcgatggcatcgcgcagggcctctgggtcggcgctgctctcgacgcgtacggcctgggcgggcacatccgcgctgacacgcgcggccgggtcaaccgtctgtacggcacgcgtgatggcgcccacgcagtggttgcacgacatgccttcgacctggaactggatcatggtgggactctcctgaacgggatgagacgggcggcgggtgccgcgacagatgcagtttgaaccttcccatggtgggaagcgcaagaggaatttgttggcgccgatgtgacggtaataccatgtgcatccggccttgaccttccaatgatggtaaggtccatgatgctgacatcgacactgtggatgactcaggacccatgccaaattccagcgctgtgctcgcttcacaacctgtccggccggccgacgaaatgcccgaatggcgcctgccggtcgacggcatgacctgcgcctcatgcgtgcgccgcgtggagaacgcgctggcccgggtgccgggcgtgcgcgacgtggccgtcaacctggcaactgaagccgcaacgctgcgcgccgactcgggcgcggtgctgccggccgccgcccgtgccgtggccgatgccggctacacggtgccgcaggacaccatcggactgaatattgccgacatgacctgcgcctcatgcgtgtcccgggtcgaaaaggcgctgcgcgccgtgccgggcgtgatggaggcgcaggtcaacctggcgaccgagcgcgccagcgtcacgctgctgcgcggcgcggcggatactgcggcgctggtggccgcggtcgcgcgcgcgggctatggtgcgacgccggtggccgatgccgcatcgcaggcgccgcaggccgcgcagggcactgccttctgggatggcccctggccggtggcgatctcggcggcgctgtcgctgccgctggtggcacccatggtgctggaatggctcggcgtgcactggatgctgccggcatgggtgcagtggctgctggccacgccggtgcagttcgtgttcggctggcgcttctacaaggctggctggaaggcggtgcgcgccggcgccggcaatatggatttgctggtggcgctgggcacgacggcggcctatgggctgtcgctgtggctgatgtggcgcacgccggccgacgccatgccgcacctgtacttcgaaagcgcggcggtggtgatcacgctggtgcgcctgggcaagtggctggagacccgcgccaagcgccagaccgccgatgccatccgcgcgctcgcggcgctgcgtcccgatactgcccgcgtgcgccgcggcggcgtggagcagagcgtgccgctggcggcggtgcgcgtgggcgacgaggtggtggtgcgccccggcgagcgcatcccggtggacgccgaggtgatcgaaggcaacagccacgcggacgaatcgatgctgaccggtgaaagcgtgcccgtgccgaagaagcccggcgaccgcatcaccggcggcgccatcaatttcgaagggctgctggttgcgcgcaccgaggcggtgggcgccgagaccgtactggcacgcatcatccgcatggtcgagcacgcacaggcggccaaggcgccgatccagcgcatggtcgaccaggtcagcgcggtgttcgtgccggtggtgctgggcatcgcgctgctgacggtgctgggctggggcctctttgccggcgactgggaaaccgcattgctcaacgcggtggcggtgctggtgatcgcctgcccgtgcgcgctgggcctggccacacccacggcaatcatggccggcaccggcgccggcgcgcgcgccggcatcctgatcaaggatgccgaggcactggaggtggcgcaccgcgtcagcgtggtggcattcgacaagaccggcacgctcacggtgggcaagccggaagtggtggcgctgcatgcggccgatcccgccgatgccgacggcagcgcgctgctggcgcggctggccgcgctgcaggccggcagcgagcatccgctggcccgcgccgtgctggccgcagcgcaggcgcgcggcattgccgcgccgcaggccacggaagtgcaggccctgccaggccgcggcattgccggcgtggtggacggccaggcgctgcaactgggcagcgagcgcctgcgtgaagcgctgggcgcagcggcaggcacgctggcaacgctggcggagcagttacgcgcggacggccgtaccgtgtcgtggctggtcgaaaccacgctgccgcgcgtggccgggctggtcgcgttcggcgatgccatcaagccgggcgcgccggcggcgatcgccaggctgcgcgcggccggtgtgcgcaccgtgatgctgaccggcgacaatgccggcgcggcggcgcgcgtggcgcaggcgctggggctggacgacgtgcaggccgaggtgctgcccgaggacaaggctgcccgggtgcaggcgctggggcgcgatggcgcggtggtggcgatggtgggcgacggcatcaacgatgcgccggcgctggcggcggcggatgtgggcattgccatgtcgaccggcaccgacgtggccatgcacgccgccggcatcacgctgatgcgcggcgacccggcgctggtggccgatgcgctggcggtctcgcaccgcaccgtgcgcaagatccggcagaacctgttctgggcttttttctacaacgtggtaggcattccgctggcagcggccgggttgctgaatccggtggtggcgggtgcggcgatggctttctccagtgtcagcgtggtcagcaatgcgctgctgctgcgccgctggcgtccgcaggccggggctgccacggcacagggaggcgagcgatgaatatcggcgaagcggcgcaggcgtcgggcgtgtcggccaagatgatccggcactatgaatcgatcgggctggtggcggcaccgccgcgcaccgagggcggctaccgtcgctatgacgaacgcgccgtgcacaacttgcgcttcgtgcggcgcgcccgtaatctgggattctcgctcgacgaaatccgcaacctgctgtcgctttggcatgaccgcggccgcgccagtgccgacgtcaaggcgctgacgctgcggcatgtggccgaccttgagctgcgcatcgctgaactggccgccatgcgcgacacgctgcgcgagctggcgcagcactgcagcggcgacgatcggccggattgcccgatcctcgccgatatggcgcagccggaagcgcagggcaggcttgcctgccacggttgagcgggacagagtgcaaggcaggcagcaggcagcaccacaaagaataacgacagccggcgccagccttttgctggcgctccgtgccgggaggagacttgcgcgaatggaacaaccgatgacggacgatcctgctattgccggtgttgccggcatgcctgccgataccccagccggcacgcacgcgccggtacagagccgccagcgcatgcgcgacggcaccgagctgctgctgcgcacctggcagcccgatccggcgcgctttgccgagccgctcggctcggtgctgctggtgcatgggcttgccgagcatgccggacgctaccagcatgtggccgatgtgctgtgcgggctgggcctgcgcgtgcgcgcgcacgacctgcgcggccatggcgccagcggcggcgcgcgcatggtggcggaccatcaggatgcctacctcgacgacctcgccgagatctatgatgccgcggtgccgggctggaacgagttgccgatcctgctcggccacagcatgggcgggatgatcgcggcgcgctttgccaccgcgcgcgtgcgcccggtgcgcgcgctggtgctgtcctcgcctgcgctggcgctgcgcctgtcgggcccgatgctggcgctgcaccgcgtgctgctggcgctggcgccgcggctgcgcgtgcccaatccgatcgatgcgcggctcttgtcgcacgatcccgccgtggtggccgcctaccgctcagacccgctggtgcagaccaccatcaccgccagcgtactggagagctttatccgcggcatggcgcaggcccaggccgatgccgcgctgctggaggcccccatgctgatgctggtcggtggcgccgaccgcgtggtggacccggccggcagccgcagcttcttcgaccacgcgccgccggagttgcgcgaacaggtctggttcgagcacggctaccacgagatcttcaatgaagcgcagccgctgcgcggcgaagtgttcgcggcgctgaccggctggctgcagcgtcacctgcagcagcagggacactaagtccggaacaccgactcggccacgccgaacactgccgcgacgaccgggtcgtcgcggcgcgtggccaggcataccagcgtcagctcggtctgcaccgagaccccttcaacgatcaccagcccgtgcgcatgcgattcgcgcagcgcgatcgcgtcgcgcaccagcgacagccccacgccggagcgcaccaggtccagcatcgaagcctcctggtcgacatgcgccaccttgggcacgccggccgggtcgacgccggcctgcgcaaagcgcgcggacaagagccggttgtgcgccgattcgggcggcgtccagatccacggcagcgttgccagctgcgcccatgaacgcagcgcggtgcgctctttccagcccttgggtgccaccacatagtaggagaacggcgtcagcgtcagcgcatggaagccggcgtcaggcggctggcccaggtagaagcccacgtcgagcgcgccgctgcgtacctgttgcagcacccagcccgacatgccgtggcgcagttctgtgccgatctgcgggtggcgttccaccagcgtgcgcagcatcgggcccagccgcgtgaattccggatcgaggatggtgccgatcgccagccggccgcgcacggtgtgatgcatcgcgctgacggtgtgctgcaggttgcccacgccgtcgaggatgcgttcggccagcggcagcagtgcggcgccgtcggcggtcagcgtcaggcccgcggcagtgcgctcgaacagccggatgcgccacgccgattgcagcgccttcaactgcaggctgactgcgggctgggtcaggtgcagccgctgcgcggcgcgggtcaggttgccctcgcgcgcgacggcaacgaaggcgcgcaggtggtggaggtccaaggcagtgtcggggcgaaaggtggcgcaggggcgaggcgtggtgcggcgcaatattttgcgcggcttatattgcgattgacgataaatcattggacggggccgcgcaactgcaccaagcttgcgctcaatacggcccggcacgccttgtgcggcgcggcatcgatgccagcgcgagactggcggatgtttgcgccagcgtcttcaccagacgcaaagatcgggcgagccgcatgccgtcagcgacccagcattcaggagcggaagtggaagacatccttgcagaagccagcgcggtgcagaccatcatcggccatagcatcgcaggccggcagacacgcggcgcatcgcagcgtctggccgatatctataaccccgccaccggcgaagtcgcagcacgcgtggcgctcggcaccacgcaggacgtggccgacgccgtcgccgccgcccatgcggcattccccgcctgggccgacaccccgccgctgcgccgcgcgcgcatcctgttcaagttcaaggagctgctcgaccagcaccacgacgacctggccgcgctgatcacgcgcgagcacggcaaggtgttctcggacgccaggggcgaagtcacgcgcggcatcgaggtggtggaatttgcctgcggcatccccagcctgctcaagaccgacttcaccgacaacatcggcggcggcatcgataactggaacctgcgccagcctctgggcgtggtggcaggcatcacgccgttcaacttcccggtgatggtgccgatgtggatgttcccggtggcgctggcgtgcggcaataccttcgtgctgaagccgtcggaacgtgatccgtcgccgagcctgctgattgccgacctgctgcgccaggctggtttgcccgatggcgtgttcaatgtcgtgcagggcgacaaggaagcggtcgatgcactgctggcgcatccggatgtgcaggcgctgtcgttcgtcggttcgacgccgattgccgagtacatctatacggaaggcaccaaacacggcaagcgcgtgcaggcattgggcggcgccaagaaccacctggtggtgatgcccgatgccgatctcgaccaggcggtcgatgcgctgatcggtgccgcgtatggttctgccggcgaacgctgcatggcgatctcggtcgccgtggccgtgggcgatgtcgctgacaagctcgtgccgcgcctcgccgaacgtgcgagctcgctgaagatccgcaacggcatggagtccgacgccgaaatgggtccgctggtaaccgctgcgcacaaagcgaaggtggagggctatatcgccaagggcgtggaagagggcgcgacgctggtcaccgatggccgcggtcataccgtacccggccatgagaacggcttctatgtcggcggcacgctgttcgaccacgtcaagccggatatgacgatctacaaggaagagatcttcggcccggtgctgtcggtagtgcgcgtgcatgactttgccgaagcggtggcgctgatcaatgcgcatgaattcggcaacggcgtgtcgtgctacaccagcgacggcggcatcgcgcgtgcgttcgcgcggcagatccagatcggcatggtcggcatcaatgtgccgatcccggtgccgatggcgtggcattctttcggtggctggaagcgatcgctgttcggcgaccatcacgcctatggcgaagagggtgtgcgcttctacacgcgctacaagagcgtgatgcagcgttggccggattcgatcgccaagggcgccgagttcaccatgccggtggcgaaataagccgcaacgatgacgacaagaacagcgatggagacattcgactacatcatcgtgggggccggttcggcaggctgtgtcctggccaaccgcctgacgcaggatgcggacgtcagcgtgctgctgctggaggccggcggcaaggacgactaccactggatccatatcccagtgggctacctgtactgcatcggcaacccgcgcaccgactggctctatcgcaccgaggccgaggccggcctgaacggccgctcgctcggctatccgcgcgggcgcgtgctgggcggttgctcgtcgatcaacggcatgatctatatgcgcggccagcgcgaggattatgacgagtgggcgcggctcaccggtgatgctggctggcgctgggacaatgtgctgccgttgttcaagcgcagcgaggaccaccaccgcggcccgagcgaattccatggcgccggcggcgaatggcgcgtggaaggccagcgcctgcgctgggacatcctggagcgctttgccgatgccgccgaagaggcggggattccgcgcacggaggacttcaaccgcggcgacaacttcggcgtcggctatttcgaagtgaaccagcgccgcggcatccgctggaacacggccaaggcgttcctgcggcgtgcgtcggagcgtcccaacctgaccattgtcaccggggcgcaggtgagcgggctgaccttcgacgggcgccgctgcaccggcgtgaactatatcggcggcggccggccgcacacggtggcggccacgcaggaagtgatcctcgccgcgggcgcggtcaatacgccgcagctgctggagctgtcgggcatcggccaggccgagcgcctgcaggcgctgggtatcccggtgcgccatgcgctcgccggcgtgggcgagaacctgcaggaccacctgcaactgcgctcggtggtgaaggtcagcggcgtgcgcacgctcaacacgcgcgccgcgagcctgtggggcaagttctgcatcggcgtgcagtacgccttcaaccagagcgggccgatgagcatggcgccgtcgcagctgggtgcctttgcgcgctcggacccggcgcaggcgcggccgaacgtggagtaccacgtgcaacccttgtcgctggacaagttcggcgacccgctgcatgcgttcaacgcctttaccgcgagtgcctgcaacctgcggccgacctcgcgcggcagcgtgcatgtcggcagcgcggatttccgccaggcgccggtgatcgcgcccaattacctggcgaccgacgaggatcggaaagtcgcggccgactccatccggctcacgcgccgcatcgtggcgtcgccggcgctggcaccgttccagcccgaggaatggctgccgggcccggcattccagaccgacgaacagctggccgaagcggccggcaatatcggcaccaccatcttccatccggtgggcacctgcaagatgggccgcgccgacgacccgatggccgtggtcgaccatcgcctgcgcgtgctgggtatcgatggcctgcgcgtggtcgatgcctcggtgatgccgctgatcacatcgggcaacaccaattcgccgaccatcatgatcgccgagcgcgccagcgacctgatccgcgaagaccgccggcagggcctggcggcggcggaagtattggtgcaaccggcgccggcggcagccgctgcaggcgcctgacatgagcgcgccacgggtcgcgggcggggccgtgaccgagtggcgcagcctgctcatgtgcgcttgcaaaaaaactgacacttggttcatgtttcatagtgcaaaccccgatgttttgcgatgcaacaggcgcacacaatagacgcctcacagggtgcgtcggcagcacatcgaagccatcgccgcaacctgcgcgggagccgccccgcaccaatacagaaagccgcaggcagggccgcaagcacggccagcctggcggaacaagcggcagcaagggcctacaaggccggttcggaccattgtcagtgccgggcatcaccccggcagttcagcaagagggcgggcaggagacatgaaccagcaggaaaccatcctggaaacgcggaacctcaccaaggagttcaaggggttcacggcggtgagcgacgtcaacctgcaggtgcgccgcgggtcgatccatgcgttgatcgggcccaacggcgcgggcaagacgacttgcttcaacctgctcaccaagttcctggagccgaccaccggcaccatccttttcaacggcatcgacatcacccgtgaaaagcccgcgcagatcgcgcggcgcggcgtgatccgttcgttccagatctcggcggtattcccgcacctgacggtgatggagaacgtgcgcatcgggctgcagcgccagcttggcacggcgtaccagttctggcgcagcgagcgctcgctggacgtgcttaatgaccgcgccatggagctgctagagcaggtcggcctgaccgagttcgcgcagacgctgacggtgaacctgccgtacggccgcaagcgcgcgctggagatcgccaccacgctggcgatggagcccgagctgatgctgctcgacgagcccacgcagggcatgggccacgaagacgtggaccgcgtcacgcagctgatcaggaaggtctcggcgggccgcaccatcctgatggtggaacacaacatgagcgtggtctcgtcgatcgctgacaagatcaccgtgctgcagcgtggcgcgatcctggccgaaggcccgtatgccgaagtgtccagggacccgcgcgtgatggaggcctacatgggcaccgtcgacgcggaactgcagggcgcgcactgagagggccggggaacgatatgacttcattgaacacacccgcgctcgagatcaaggacctgcacgcctggtacggcgaatcgcacatccttcacggcgtggatttgaccgtgaaccgcggcgaagtggtcacgctgctgggccgcaacggcgctggccgcaccaccacgctgcgcgcgatcatgggactgaccggcgcgcgcaagggctcgatcaaggtcaatggccacgagaccatcagcctgcccacgcacaagatcgcgcactacggcattggctattgccccgaagagcgggcgatcttctccagcctctcatgcgaagagaacctgatgctgccgccggtgctgaagggcgccgacaccagcaagggcatgagcgaaaccgatatctacgagatgttcccgaacctgaaggagcgccgccagagccagggcacgcgtctttccggcggcgagcagcagatgctggcggtcgggcgcatcctgcgcaccggcgccaacctgctgctgctcgatgaaatctcggaagggttggcaccggtgatcgtgcaggcgcttgcgcgcatgatcctgatgctcaagcagaaggggtacacggtggtgatggtggagcagaacttccgctttgccgcgccgctggctgaccgcttctacgtgatggagcacggcagcatcgtcgagcgcttcgcggccaatgagctggaggccaagatgccggtgctgcacgaactgctcggggtctgatccgcacggatcatgggttgatgtttggcaggaacgggtggcgcgcacgccgccgcaaatcaggagacatagacatgaaaaagactcggctcgcggccgcgatggcggccattgccatgggtgcggtttccttcagcgccgttgcccaggtgtccggtgacaccgtgaagatcggctacatcaccgacatgtcgggcctgtacgccgacatcgacggccccggcggcctggaagccatcaagatggcggtcgaggaccgcggcggcaaggtgctgggcaagcccatcgagattgtctctgccgaccaccagaacaaggccgacatcgccgcctcgaaggcgcgcgaatggatggaccagcagggcctggacctgctgctgggcggtaccaactcgggcaccgcgctggcgatgaacaaggtggcttcggagaagaagcgcgtctacatcaacatcggcgccggcaccgcgcgcctgaccaacgaagagtgctcgccgtacacggtgcactacgcctatgacacggtggcgctggccaagggcaccggcagcgcggtggtcaagcagggcggcaagtcgtggttcttcctgaccgccgactacgccttcggccattcgctggaaagcgataccgcggcggtggtcaaggccagcggtggcacggtggcgggccaggtgcgccatccgctgtcggcatcggacttctcgtcgttcctgctgcaggcgcagtcgtccaaggcgcagatcctgggcctggccaacgccggcggcgacaccatcaatgcgatcaaggcggccaaggaattcggcatcaccaagtcgatgaagatcgccggcctgctgatgttcatcaacgatgtgcacagcctcgggttgaagaacaccgaaggcctgctgatgaccgacagctggtactgggacatgaacgacgacacccgcaagttcgccaaccgcttcttcggcaagatgaagaagatgccgagcagcctgcaggccgcggactactcggcggccagcacctacctgaaggcggtggaagcggccaagaccgacgatccggacaaggtcatggccgagttgaagaagatgaagatcaacgacttctataccaagggctatatccgccaggacggccgtggcatccacgacatgtacctgatgcaggtgaagaccgcggcagagtcgaagaagccgtgggactacctgaaggtggtcgcgaccattccgggtgaccaggccttcaccacggtggccgagtcgaagtgcgcaatgctgaagaagtaagctgatgtgagatctgccggcggcgcgccacctgcgtgccgccggcatcggacgcggttccttgctgcggtgttcgccaacggtgttcgccgcagcgttcgcattacctggcaccaaccgcagcaattcccgccatacaacggcggtatcaacggcactccgcgatggacatcttcggaatccccttgccggccatgctttcccagctattgctggggctggtcaacggcgccttctatgcgatgctgagcctgggcctggcggttatcttcggcctgctcaacgtcatcaatttcgcgcacggcgcgctcttcatgctgggcgccgtgctggcctggatgggcatggagtacgccgggctgaactactggatcatgctgctgctgtcgccgctggtcgtcgccgcactgggcgtggtgatcgagaagaccatgctgcgctggatctacaagctcgaccatatctacggcctgctgctgacgctgggcatcacgctggtgatcgagggcatcttccgctcgatctacggcgtctccgggctgccgtactcgacgccggatgcgctgcagggcgcgaccgacctgggcttcatgatcctgcccaactaccgcgcgtgggtcgtggtggcgtcgctggtggtgtgctttgccacctggtacgtgatcgagaagacaaagctgggcgcctacctgcgcgccggcaccgagaaccccaagatggtcgaggccttcggcgtcaacgtgccgctgatggtgaccctgacctacggcttcggcgtggcgctggccgcgtttgccggggtgctggccgcgccggtgatccagatctcgccgctgatgggccagaacctgatcatcatcgtgttcgcggtggtggtgatcggcggcatgggctcgatcatgggctcgatcctgaccggcctggggctgggcgtggtcgaggggctgaccaaggtgttttatccggaagcgtcgtcgaccgtggtgttcttcatcatggtgatcgtgctgctgctgcgcccggccgggctgttcgggaaggagaagtgatgagcgcaccctccacatcatcgacgccatccacggtggcggccaacgcgggcaacgcaggaaagggacaaggcgtgcagaagaaactgttgtacggattgctgctgctggcactggtggccgcgccgctggcaggtgcgtatccggtgttcgtgctcaaggtgctgtgcttcgcgttgtttgcgtgcgccttcaacctgctgatcggttataccgggctgctgtcgttcggccatgcggccttcttcggcggcgctggctacgcggccggccatgccatgaaggtctggggcgtgaccccggaaatcggcctgatcctgggcaccggtgcgggcgcgctgatcggctacgtggtgggctcgctggccatccgccggcagggcatctacttctcgatgatcacgctggcgctggcgcagatgctgttctttatctgcctgcaggcgccgttcaccggtggcgaggacggcctgcagggcatcccgcgcggcaagctgttcggtgtgctgccgctgtcggacgacctgacgctgtactacgtcgcgctggcgatcatcgtggccgcctttgcgctgatcgtgcgcacggtgcattcgccgttcggccagattctgaaggcgatcaaggagaacgagccgcgcgcgatctcgctgggctatgacgtcgaccgcttcaagctgaccgccttcgtgctgtcggcggcgctgtcggggctggccggctcgatcaaggcgctggtgctgggcttcgagacgctgaccgacgtgcactggtcgatgtccggctcggtcatcctgatgaccctggtcggcggcctgggcacattgtcgggtccgattgtcggtgccttcgtggtggtcgcgctggagaacaagctgggcgacatcggcaacttcctggcgtcggtcaccggcatctcctggttcggcacgctgggcgagtcggtgacgatggtgaccggcgtgatcttcgtgatctgcgtgctgactttccgccgtggcatcatgggcgagctgctggcgcgcttcgggggccactcgggcaagcgggagtaacccggcaggagtgaccgcgggtcgacatgcccgattctggggctagggttttttctagcttgtcctcgatgcaccgcttcgttacattccatatacggttttcgcaggttaaatggaggcggaagcgaggagacgacaggcgcgcacccggtgtcgggtagcagcgttataaataaagggcgttgccgggtgatcctcggcaacgcttttttcatttgggcctcccaatcgctgctgtggcgctttcgccccatcatggggcatccaggctgcaccggcatcacctggctaccctccacatgcgacaatgcgggcgctctcattgcccgccatgcctgccgcacctgattcccccgactccccagccgttccggatcatcccgacgcgcccgcgccgcagggtttggtacgcctcggactgggcgccgacgcagccacgctggaagcctggctggctacggtgcagccactgccggtgcccgccgcgcgcgcgcgccggctgatgctggacgagctgctggcccagtccggtcgcggcatctgcctgctggtggatgatgcgcaggctccgcacgatctgctggcgtgcctgccggtggcgctgctcccgagcctcgagcttgccgggctggccgcttgcggcatggagtggtgggtacggcccgggctggacggcggggcccgccgcgcctgccttgaggcctgttgtgccacgctggccgactggggccgcgcgcacggtatccgtcacgcgctgctggcgccggggctggcggcagggcaaggcggcgcgccgccgggcttctgcccgcatggcaacggcatgtggcaccgcagcctggtgcctgcggccaaggtgctgggctgaactgataccgcccggcagcgcgccggcccgcccgcaccgatctcctccgatcctatcccttttcgctttcctgcttcctgcaatgacggaattcgcattcctggcggttgccgcctttctcgccggcctgatcgacgcggtcgccggcggcggcggcctggtacagatcccggcgatgttctcggcctatcccaatgtcgcgccggccacgctgctgggtaccaacaagatgggctcgatcgcgggcaccgccaacgcggcgctgcgctacggccgcagcgtgcgtatctactggggagcgaccgcgcccgcggtggtggcggcccttgtcttctcgatggccggtgcctgggcgctgaccaagattccggccgaaccgctgcgcaaggcgctgccgttcgtgctggtggtgttgctggtctacaccgtggccaagaaggacctgggtacggaacacgcgccgacgctgtcgggcgcgcgcgagcgcatcgcggcgctgctggccggcgccgtcatcggtttctatgacggcgtgttcggtccgggcaccggcagcttcctgatgatcgcgttcgtgcgggtgttcggctatgacttcctgcacgcggcggcctcggccaaggtggtcaaccttgccaccaacctggcggcgctgctgttgctggccagcaagggccatatctggtggcagctgggcctggtgatggcggtggccaacatcgccggcagccaggtgggcagcaagctggccctgcgccacggcagcgccttcgtgcgcaaggtgtttatcgtggtggtgagcgcgctgatcctgaagaccgcctgggacgcgttcctgcgctgacggcgaagccgggcggcgctcgcgatgcgggttaatcctcccttttcgcgccaagtcgctgtgctagactcgatccgaattcccgaccgcacggtcggtgaatagccggatcgcgccgatccgggggagtggtgcggacggggaaactggggagcggccttgcgtcgttcctggctgtagcgcaggtgccggcgatgtgcctgtgttgacccgaggggtcgatcaaggcccactgaaccggatggaatgcgcacccgctgggctgcgcctcatccagttcagtggaccagggcatccgccggtggacgccggacggatgcctttccgtttcaggaaccgaggagacaagatggatttcaagcgcgccagcctgctggcaatcgctgcggcgagcctggttgccggtgcagcccaggcacaggtcaaggtcggggtgacggtgtcggccacgggtccggcggcatcgctgggtattccggagaagaacaccttcacgctgatgcccaaggaaatcgcgggcaagaagatcgagtacatcgtgctggacgatgcctccgacaccaccaccgcggtcaagaacacccgcaagctgatcagcgaagacaaggttgacgtggtggtgggttccaccgtgacgccgaactcgctggcgatggtggacgtggtggccgagaacgatacgccgatgatcaccatggccgcctcggcccgcatcatcgagccgatggatgccaagcgcgcctgggtcttcaagacgccgcagaatgactcgcacatggcgaccgccattgccgagcatatgaccaacaacaacgtgaagacggtggccttcatcggcttcgcggacgcctatggcgacagctgggcgcaggagttcgccaaggtggcggagctgcgcaagatcaaggtggtcgccaacgagcgctttgcccgtaccgatacctcggtcaccggccaggtgctgaagatgatgagcgccaatgccgacgccgtgctgatcgcaggctcgggtacgcccgcggcgctgccggccaagacgctcaaggagcgtggtttcaagggcaagatttaccagacccacggtgtggccaatgccgacttcctgcgcgtgtgcggcaaggattgcgaaggcacgttcctgccggccgggccgctgctggtggctgagcaattgccggacagcaatccggtgaagaagccggccatgtcctacaagacttcttacgagaaggccttcggtggccaggtctcgaccttcggcggtcatgcctgggatgcggggctgatcctgcagcatgccatccctgaggcgctgaagaagggccagccgggtaccaaggaattccgcaaggcattgcgggatgcgatggagcagaccaagaatctgccggtttcgcatgggatcatgaacatgagtgctaccgaccaccttggctttgatcagagggcgcgggtgatggtgcagattgttgatgggaagtggaagttgttgactaagtgagggtcgggggcggcgtggcgctatgcggttgggtgtcgcccttggcaagtgctgctgtttcgccggcttagccggcgagtcactttctgtccgagcgacagaaagtaaccaaagaacgcgtcgcctatgcggctggcaataaattgcacggtgttggtggttcgcacggtggtgcttgccgttctggcgtggttgcccgttcgaccctgctacgccatgtgagtcagggatagtgccttcgataacccactattgaacaatccccatgcagggcgtaggccgcctgctgcaaacggcatcgcctggacgcctacggctgctgcgccggctcaaagtgcgctgacggtcattgggcgcttgcgcgaaacgctacacctgccaagagcgacaaccaaccgcatggcaacaatgcgaaacgctcacgccgccatacacacctctcgttagggcttgcctgtatttccacattaggcaatccgtttactattgcgtaaatcccgaagcacacagcaccctgtcggcccccatatgatgcaggcaggtatttccaagagacggggagacaatggacttatcaatcgctgccatcctggcccaggacggcatcacctcgggcgcgatctacgcgctgctggcactggccctggtgctggtgttctcggtgacccgggtcatcttcatcccgcaaggggagtttgttgcctacggcgcgctgacgctggcggcgatgcaggccggtcacgcgccgcagaccagctggctgctgctggcgatgggggcgctgaccttcatctatgaaaccgtcacggtgctgcgcagcgccgagttgcgccgcacgctgggccagcggctggcggtgctggcaggcaaatacctggtgttcccgctcgcggtgcactggctggcgcagcagtatggcgcgcagccgctgccgatgctggcgcagatcgcgctgacgctgctgatcatcatcccgctggggccgatgctgtaccggctggcctaccagccgctggccgaggccagcacgctggtgctgctgatcgtctcggtcggcgtgcactttgcgctggtggggctgggcctggtgatgttcggggcggagggttcgcgcaccaatgcgttctcggatgcgcgcttcgacgtgggggcgctcagcatctcgggccagagcctgtggatcgtgggcgtgtcggcgctgctgatcggcgcgctgtacttctatttcgagcgcacgctgcagggcaaggcgctgcgcgcgaccgcggtaaaccggctgggcgcgcgcctggtcggtatcggcaccacgcaggcggggcggctgtcgttcacgctggccgcggcgatgggcgcgctgtgcggcatcctgatcgcgccgctgaccaccgtgtactacgagtcgggcttcctggtgggcctgaagggctttgtcggcgccattgtcggcgggctggtgagctaccccgtggcggcgctcggtgcgctgctggtgggcctgcttgaatcctattcgtccttctgggccagcgcgttcaaggaggtcatcgtcttcacactgatcattccggtgctgctgtggcgctcgctgacgagcaagcatgtcgaggaggaggaataagccatgaccatgctgaccgacaagcaggcgcgggtggccagtgccgaggcaggcagccgtgcgcggctgaaccgcaaccgggtcctggtgctggctttcattgtggtgctggtgttgctgccggcgctgccgacgccggagttctggatcacgctgggcaattacatcggcctgtacagcatcgtggcgatcgggctggtgctgctgaccggggtgggcggcatgacctcgttcgggcaggccgcgttcgtggggctgggcgcgtacagcactgcgtacctgaccacgcagttcgggctgtcgccctggttcgggctgatggtggggctggtgatcacgatggcatcggcctatgtgatcgggctgatcacgatgcgcatgtccggccactacctgccgctggcgaccattgcctggggcctgtcgctgttcttcctgtttggcaacctggagttcctgggcaagtatgacggcctgaacgggatcccggtgctgtcgctcttcggcatcgagctgcagtcgggccgctcgatgttctacctgatctgggcggtggtgctgctggccgtgctggcgatgcagaacctgctgaactcgcgcccggggcgcgccatccgcgcgctcaagggcggtggcgtgatggccgaggccatgggtgtgaacaccgcatggatgaaagtggtgatcttcgtggtggcggcggtcctggcgtgcgtgtcgggcttcctgtacgcgcacctgcagcgcgcggtgaacccgacgccgttcggcctgaactacggcatcgagtacctgttcatggccgtggtcggcggcgtgggccatgtgtggggcgcggtgctgggcgcgggcatcctgaccatcctgaaggatgtgctgcagggcgtgctgcccaagctgctcggtgccaacggcaacttcgagatcatcgtcttcggcgtactgctggtattgctgctgcaatacgcgcgcgatggcatctggccgttcctgcggcgtctggtgccttctggtccaccggtgctggcgccggcgcaggccgaggccctggccgtgcgccagaagcccgaggcgggcgacctgattctggatgtgcgcgccgcgcgcaaggagttcggcgggctggtggcggtgaacgatgtcagcttccaggtgcgcgcgggcgagatcatcgggctgatcggtcccaatggcgcgggcaagtccaccaccttcaacctggtgacgggcgtgctgccggtcacgcgtggggaggtgcgttaccgcggtgaagtgatctcgggcctgccgtcgcgcgagatcgtcaagcgcggcatcggccgcaccttccagcatgtgcacctgctgccgaccatgacggtgctggagaacgtggccatcggcgcgcacctgcgcggtgatttccgcgcccagggcggcgtctcggcagcgatcctgcgcatgaacaaggccgaggaagagaagctgctgttcgaagcgaagcgccagcttgaacgcgtgggcctggccgattgcatgtacatggaagccggcagcctcgcgctgggccagcagcggattcttgaaatcgcgcgtgcgctttgctgcgacccggcgctgctgctgctcgacgagccggcagcgggcctgcgctacaaggagaagcaggcgctggccgagctgctgcgcaagctcaagggcgagggcatgagcgtgctgctggtcgagcacgacatggatttcgtgatgaacctgaccgaccggctggtggtgatggaattcggcacgcgcattgccgagggcgtgcccgaggaagtgcagaagaaccccgcggtgctggaagcctacctgggtggcgtggagtaaggaccggacatgagcctgattctcgaagtgaaggacctccacgtccgctacggcaaggtggaagcggtgcacggcgccaacctgaaggtggaggccggcaagatcgtcacggtgatcggccccaacggtgccggcaagtcgaccatgctcaatgcggtcatgggtgcgctgccggtgacggggtcgtcgagcggctcggtcaactacctcggccacgacatggccggcatcccggtggaatggcgcgttgcgcgcggcatgtgcctggtgccggagaagcgcgagctgtttgcgtcgatgacggtggaagacaacctgcagctgggtgcctttcgccgcaagcgcgccggcgagaagaactacctggaccagatggacgtggtctacgacctgttcccacgcctgcgcgagcgtgcccgccaggacgccggcacgctctccgggggcgagcgccagatgctggcggtgggccgcgcgctgatggccaagccgcagctgctgatgctggacgagcccagccttggcctggcgccgctgatcgtgaaggagatcttccacatcatcagcaatctgcgccagaccggcgtggccacgctgctgatcgagcagaacgcacgcgctgcgctgcaggtggcggactacggctatgtgatcgagaccggggatatggcgatggaagggctggccgacgaactggcggcgaatccgaaggtgatcgaaacctatcttggattggcaaaaaaggcggcttaacccgcccggttttcgccagaggaatgagggtctgcggatgcaggcccttttctattggtggtgtgaataactttggggataacccaattcagaggcgcttcgggcggatgtcgctatcggtgcgctgatgtaggtacgcaaatatctactggggtaatttttagcaatcaaatttaccgaataacatccatacagataataattttaggaattttatctgtgggatgaatgtatttttgcataattttttccatgttagtcatccggagaataaagtgttggtgccgctgcctgtatccttcgctgcggtttccagcagccaatcccggaagcagttcagcgccggatgatcgcgccgttccttcggcgcacacaggaaatagccccgttgcagcgtaattggcaggtcaaacggcgccgttacgcgtccggcggcaatttcgtcgcgcaccaggcaacgctgcagcacggcgacgccgatgtcggcgcgcaccgcctggatcaggatcgagacctggtcgaacgctgtggataaccttggcgcagcgttgggtacgccggcggcctgcagccagttttgccagttcgccggtgcggtggtgtggtagagcaggggctcgtccagcagctccgcaggagactgccagcggccggcctcgcgccgtgcccgggcgcggtccggatggcagaccggcaccaattcacgtcccaccacatagtcggcctgcaggccgggccatttgccggcttcacccgccaggatggcggcgtcgggggaggggccggagaggtcctcgtcgcgctggtacgggacgaagtccagccggatttccggatggcggcgatggaagtccggcaggcgcggcaccagccagacgctggccagcgtgggcacgacggacagcgtcaggtggtgccggcggttgccggcgcgcagggtggcgctggcatgctcgatcgtggccagcggctcggccacggcctcaagcaatttccggccggcatctgtcagcaccagccggtgggcattgcgctgtagcagcggctgcccgaaatgcgcctccagccgcgcgatggcgcggctgatggcaccctgggtcacgcacagttcgtccgccgcacgcgtgaagctgcccagccgcgccgcggtggcaaaggcgtgcaactcagacatcgatggggaatgcagccgcatggcgggggaagggaggaagggcgggacggctgccggagcggccgccgcaggatgatctttggtaatgcaaacgtgcaatatagtcgtttgtgcccgcccggtaaacggctgacactcgtccggttcatgcacaaaaccaacaggagaatccccgtgatccgagccaggatgtcccgccgccagctgctgctgtccggtaccgccgccgctgccacgctggcctttgccggcaacgcgttcgcgcaagccaattacccgacgcgcccgatccgtctgatcgtgccgttcgcggcgggtggctccaccgacctgtcggcgcgcctggtggcagagtttgccggccgcgagctgggccagtcgatcgtggtcgagaacaagggcggcgccggcggctcgctgggcatggagcaggtggccaacgccgcgcccgatggctacaccatcggcatggccacggtcagcacgcatggttccaacccggcggtgtacccgaagctgaagtacgacccgatcaaggactttgccccgatcaccaacgtggtgtcgatgccgagcgtattcacggtgcatccgagcgtgccggcgaaaaccatgcaggagtttattgccttagccaaggccaatccggggaagtattcagttgcctcgccgggcacagggaccctcggccacgtaaatcttgagaacttccagatgctggcgaagatccagctgctgcatgtgccgtacaagggcgccggccttggactcaatgacgcggtggcagggcaggtcaatgcaatctcggacaacctggcctccgcgctgcctcacgtgaaatcgggccgcctgcgcgcgctggcggtgcttggcgccacgcgctcgccgcagttgccaaacgtacccacctatgcagaactgggctacaaggagatgggcgacggcggttggttcggcatcgtcgcgcccgcgaatacgccgcccgccatcgtcgccaggctgaaccaggcgatccacaaggccatgcagaaccccgagttcaagcgcaaggtggaagaatccggcggcacgctggtgccgactacgccggagcagttcaaggcgcagatccagcaggcgatggcgcgctacgcccgcgtggccaaggctgccgatatcaagctggactgaggcatggcggaggcaatcaaccaagctgcggtactgccgccggtcatcgtacgcctgccggaaggggaggcgctgccgctggtatgcgactcgccgcacagcggtaccgagtacccggctgacttcggtgcggcgatcccggccgcgcgcctgcgtggcggcgaggatacccacgtcgatgccttgtgggaggccgtgcccgcagcaggtggtacgctgctggcggccactttcccgcgggtctatatcgacccgaaccggatgcccgacgacatcgacccggcccagctcgacggcacctggccgacggcattggccccggggccgaagacgcggctgggcttcggcctgatctggagccgggtcgacgccagcacgccgatctatgaccgccgcctgtccgtgacggaagtgcaggcccgtatagaccgctactaccggccataccatgcggcgctggccgaggccgtggagggcgcccaccagcgctttggcgcgctctggcacctgaacctgcactccatgcccaacaacgcctacgagcggctcaagatcgccagcccgcatccgctggcggactttgtgctgggcgaccgtgacggcaccacctgcgagccgggactggtcgacctggtcgaacgggaactgcgcggcatgggttacacggtggctcgcaacgacccgtacaagggcgtgcagctgatcgcgcagattggccggccggccgagcggcgcaatagcctgcagatcgaaatccggcggccgctgtatatggacgaggtgacgcgcgagcgcaatgccgggttcgccaccttgcagcgcgatcttgacaagctgacccagcaggttacgggctatatccgcgcgcagctttgaggcgcttgttcctcgtgaaacatcaggccgggccatgtgcccggcctttttgtttcacgtggaacataacgtcgctttcgagcgactcgccgggtatcgccaacgccatgtttcacgtgaaacatggttaccatcggaaggcggctagtcgattgccgctataatttcgcattcccgtattttcccgccagcctcccggaggaggtgtcccatgctttacccaaaagaattcgacgtcatcgtcgtcggcggtggccatgccggcactgaagctgcactcgccgcggcccgtatgggctgccagacgctgctgctgactcacaacatcgagacgctgggccagatgagctgcaacccgtccatcggcggcatcggcaaggggcacctggtcaaggaagtggacgccatgggcggtgccatggccgccgccacggacgagtccggcattcagttccgcatcctgaactcgagcaagggccctgcggtgcgcgccacgcgcgcccaggctgatcgcgtgctgtaccgcaaggccatccgtacaaggctggagaaccagccgaacctgatgctgttccagcaggcggtggacgacctgatggttgagggcgatcgcgtagtcggcgccatgacccaggtgggcatcgccttccgcgcccgcgcggtggtgctgaccgccggtaccttcctggacggcaagatccacgtcgggctagacaactacaccggcggccgcgccggcgacccggcagcagtgtcgctgtcggcacgcctgaaggacctgaagctgccgcaaggccgcctgaagaccggcacgccgccgcgcatcgacggccgcaccatcgatttctcggtgatggaagagcagcccggcgacctggatccggtgccggtgttctccttcctgggtcgtccggagcagcacccgcaacagctgccgtgctggatcacccataccaacagccgtacccacgacatcattcgtggcgggctggaccgctcgccgatgtacaccggcgtgatcgaaggggtagggccgcgctactgccccagcatcgaggacaagatccatcgctttgccaccaaggaaagccaccagatcttcctggagcccgaaggcctgaccaccaacgagttctaccccaatgggatctcgaccagcttgccgttcgacgtgcagctggaactcgtgcactcgatccgcgggatggagaacgcgcatatcctgcgccccggctatgcgatcgagtatgactacttcgatccgcgcgggctgaaggcatcgctggagagcaaggccatcagcggcctgttctttgcgggacagatcaatggcaccaccggctatgaagaagccgccgcgcagggcctgctggccggcatcaatgctggctgctatgtgcgcgaacgcgatgcgtggacgccgcgccgcgaccaggcctacctgggtgtgctggtcgacgacctgattactcgcggtgtgaccgagccgtaccgcatgttcaccagccgcgcggaattccgcctgagcctgcgggaagacaacgccgatatgcggctgactgaggttggccgtgaactgggcgtggtcgacgatgcgcgttgggatgccttcaaccgcaagcgcgacgctgtttcacgtgaaacagagcgcctgaagagcacatgggtgaacccggcgatgcttccgggcgaagacgccgtgccgctgctgggcaagccgatcgagcgcgagtacagcctggccgacctgctgcgccggccagaagtccgctatgaagcactgatggcgctgcagggtggccgccatgccccggaaacgccgttggacgccgagccgatgctggcagagcagatccgcgagcagatcgagatcggcatcaagtaccacggctatatcgcccgccaggcggcggaggtcgacaagctggaagccaacgagtcgacgcgcctgccggaagggctggactacaccgaagtgcgtggcctgggcttcgaggtcagccagaagctgaaccagcatcgtccggaaacgctgggccaggcctcgcgcatttccggcgtgacgccggccgcgatctcgctgctgctggtgcacctgaagaagaaggggctggggcgcacgcgcgctgagtcgggcgcgccttcgggcaactctgaagaggctgcttgagtgcccggtccgcgacacaccatgaccgacgacgccacgcagcgccgtcgccttgaagccggtctggcccagatcggactggcgctggcgccggcccagatcgacaccttgtttgcctacctggcgctgctgcgtaaatggaacggcgtctacaacctgaccgcaatccgccaccccgatgagatgcttacgcatcacatgctggactcgctcgccgccgtgccggcactggccgaagccgcgcgtgccgcagaggtaggcacgccggcgcggggcagggtattggacgtgggctcgggcggcggcatgcccggcctgccgctggccatcgcctgtcccgacgtgtcggtgctgatggtggacatcgtgcagaagaagaccgccttcctgacccagtgccgtgcgcaactcgggctctccaatgccgcggcgcattgggggccggtggagaagctcgacgatgccagcggctttgccgtgatcacctcgcgcgcgtttgcggaactgactgatttcgtgaacctgtcgggccagctccttgcaccgcacggcaagctgatcgccatgaagggggtttatccacaggccgagctggaccgcatggaagctgccgggctgatggcgcaatggcaggtcgatgcggttccccgcatcaccgtgcccgggctggatgccgagcgccacctggtggtgctgtcgcggcgcgcaagcgcccacgcatgacgtacgccgcggcgctgcgtgcagcgccgcgaactgccagccccgcgctggccggatgaattgaagcaggagcctcagtagcttatggccaaggtattcgtgatcgcaaaccagaagggcggggtaggcaagaccaccaccacggtgaacctcgccgccggcctggccgcgcaggaccagcgcgtgctgctggtcgacctggacccgcagggcaatgcctcgatgggttcgggcatcgacaagcaggcgctggagcacagcgtgtaccaggtgctggtcggcctggccagcatcaagcaggcgcgccagcgttccgagaccggcaggtacgatgtgctgcccgccaaccgcgaactggccggcgcggaagtggaactggtcgagctggaccagcgcgagcgccgcctcaggcaggccatcgcagaggtcaatgacgaatatgacttcgtgctgatcgactgcccgccgtcgctgtcgctgctgacgctgaatggcctgtgcgccgcgcatggcgtgatcgtgccgatgcagtgcgagtatttcgcgctggaagggctgtcggacctggtcaacaccatcaagcaggtgcacgccaacctgaatcgcgacctgcaggtgatcggcctgctgcgcgtcatgttcgatccgcgcgtcacgctgcagcagcaggtgtcggcgcagctggaatcgcacttcggtgaaaaggtcttcaagaccctgatcccgcgcaatgtgcggctggccgaggcaccgtcctatggcatgccgggcgtggcgttcgatccgtcatcgaagggcgccaaggcgtacctggatttcggcgccgagatgatcgcgcgcgtcaggcagctgggctgaaggagagggcaagcatgagcactgcaaagaaaaagggcctgggccgcggccttgaagcgttgctgggcgggccggccgaaatcgttgaatcggtgaagcaggagggtgcgcccaccgtgctgcgcctgaaccagttgcagccgggcaagtaccagccgcgcacgcgcatggatgaaggcgcgctgcaggaactggccgccagcatccgcgcgcagggcctgatgcagccgatcctggtgcgccgtgtggccgagccggaccgctatgaaatcatcgcgggcgagcggcgcttccgcgcgtccaagctcgccggcctggacaaggtgccggtgctggtgaaggacgtggccgatgaagccgcggccgcgatggcgctgatcgagaacatccagcgcgaagacctgaatccgctggaagaagcgcagggcatcatgcgcctgatccgcgagttcagtttcacgcatgagcaggcggccgagtcggtcggccgttcgcgcagcgcggtgtcgaacctgctgcgcctgctgaacctggccgcaccggtgcagaccatgctgatggcgggcgacctcgacatgggccacgcgcgcgcgctgctggcggtggacggcgccaaccagatcacgctggccaaccagatcgtgaacaagcggctgtctgtgcgcgagaccgagaagctggtggcgtccacgctcaagccgttcgacctgaagtcgctcaagcagaagggcgccaacaacgtgcgcgacgtggcacggctggaagaagaactgtccgatgcgctgggcctggcggtgcagatcaagctgggcgcgcgcggcaagggccagctcaccatccacttcagcgacaacgacgcgcttgaaggcgtgctcgtgcggctgcgcgaatcgactgaaaagcagaaggtcgcctgaggcagggtgccaaggcgcgcgtaactttgcgtgcgcaattcggtgcgattaacggccattgcggcgatgactgttgcgtgtacgctgcagtgtccgttcctgggaccggtatacgtacggcgtacccggtaatccctcatcatgcgcagggttcgctgcgcaatccaattacgtcaaacattattgctgcgcaatttttgtgaagccatcatggcatcgtgatggcaaccgttgtgcgcaacacactgcaagctaaatgtaagcagattgacgcgaatcagtagttccccttaaaatcgtgcggtttgaattctggtcgggccgaaaagttccggcctggaataaggcgagcagtagtggttcaagaccgtcagcagcgaggcgccgggtcccgtcaggaagatgactgggacgactggaaagaaggcgcagaccgtgaggaagaggctgtcgatccgctgtcgcacgccgaggcggtgacgctgtttggtgagcgcgcgttgcgcccttcgcgcatgaccccgggcaaggttgtcctggcgcaggtgatggtcaccctgctgtcggcactgtgctgggcgctgttcgcgaaagaggccggcccgtatggctggtcggcgctgttcggcggcatggtgtgcttcgtgccgagcgggttcttcgcgttccgcctgtggctggcgcgcgaccgggcttcggtcggcggactggtcctgggcgaggcgatcaaggtctttggcacggcggctctgctggtgctggtggtggtgctgtaccgggatctgcgttgggtgccgatgctggtcacgttcctgctggcgctaaagacatatttggtggtggctctggtgatccgctaggccagccgcacgaaggcggtgcctcatccggaaatggggcaccaagacggaatatcaagatttgccgtgccggtttcacagtggtgacaccggacacggccaaggttggaccccgcttgcattgcggtgaccggcgaatccgccgaaggcaatgcaagttgcgtaccgggcgttggccagacagtggcggcgcgcggcccgaagatttcgcaatataccgttcgtatcgacatgtctgatgctacccaaggcgccgaacacgcgctgacaccctccggctatatcgccgaacacttgcagaacttgaactcggtcggcggcaagcaagcgtcggtggtcgatttctccgtgatcaactacgacacggtgttctggtccgtgctgtgcggcgccatcgccgtgctgttcctgtacgccgccgcgcgccgcgtcaccgctggcgtgccgggccgcttccaggccttcgtcgagatgatcgtcgagatggtcgatgaccaggccaagggcatcatccacggcgaccgttcgtggatcgcgccgctggcgctgatggtgttctgctggatcaccatgatgaacgcgatcgacctgatcccggtggactgggtcaacggcctgaatcaagtcctcggcatcttccacctgcacatcccccaccaccgtgcagtggccacggccgacctgaacggcacgctgggcatgtcgtgctcggtgctggtgctgatgatctactacagcttcaagatcaagggcacgggcggcttcatgcacgaactgttctcggccccgttcggcgccaagtggtatctggccccgttcaacctggtcctgaacctgatcgaattcctggccaaggccgtttcgctcggcatgcgattgttcggcaacatgtacgccggcgaactcgtgttcctgctgatcgcgctgctgggttcgatctggacgttcggcgccgacctgtccgcgctgggctttgtcggccacgtgctggccggcgcggtatgggcgatcttccacatcctgatcgtcctgctccaggccttcatcttcatgatgctgacgctggtgtacatcggccaggctcacgatcaccactgattttcggttttttggttttttggttttttggttctaagtctctctaaattaaaggagtcgtcatgcaagaatttctcgccaacatccagggtctgaccgccatcggtatcggcatcatcatcggcctgggcgctatcggcgcctgcctgggtatcgccctgatgggtggcaagtacatcgaagcctgcgcacgtcagcccgagctgatgaacccgctgcaaaccaagatgttcctgctggctggcctgatcgacgcggcattcctgatcggcgtgggcgttgcaatgctgttcgccttcgccaacccgctgctggctgtcatcaagtaattcttttcggtctgcatgatgctgacgggcggcgcgggccaccagcctggccgccttttgtgcatttatctgtagtttgattaccgaaaggaacacaccatgaatctgaacgcaacgttttttgcgcagatggtcgtgttcttcatcctgtggtgggttgttgccaaattcatttggccgccgctggtgaaggcgctcgacgaacgcgcaaagaagatcgccgatggcctcgccgctgccgagaagggcaaggccgagctcgaactcgccaacaagcgtgtggaccaggctatggccgaagcccgcaccgagggtgcacaacgcgtcgctgacgccgagaagcgcgcccagctgacggcagacgagatcaagcaaaacgcccaggcagaagccgcacgcatcattgcccaggccaaggccgaagcagaacagcaggttacccgcgcacgcgaagcactgcgtgaccaggttgccgtgctggccgtcaagggtgccgagcagatcctcaagcgtgaagtgaacgcgcaggtccacaccgacctgctcaatcaactcaaggctgagctctaatcatggctgaaaccgcaaccattgcccgtccctacgctgaggcgctgttccgcgtcgccagcgaatcgagcgcaggcaacctgggtgcatggtccgagctggtgtcggagatggggcaggttgctgccaatcccgacatgaaggcggtagccggcgatccgaacgttcccggcgacaagctggccgaactgttcctgtcggtgctgaagtccccgctgaatgacgaggctcgccgcttcgtcaagctgctggtggataacggccgcctgacggtgatgccggaaatcgccgagcagttccatgtgctcaagaacgcccgcgaagggtcgtcggatgtcgagatcaccagcgcattcccgctggaaggttcgcagttgaacgacctggtcgctgcactcgaacgcaagttcggccgcaagctgtatgcgcaggtggcggtggacccgtccctgatcggcggcgtgagcgtcaaggtcggcgacgaagtgctcgacacctccgtgcgttcgcgcctggctgccatgcaagccacgctgaccgcctgaccgcaccggccgacggattgaagaattaggagcattgtgatgcaactgaacccctcagaaatcagcgagctgatcaagtcccgcatctcgggccttggcgctgaagctgaagtgcgcaataccggcacggtgatctccgtgaccgatggcatctgccgcgtgcatggcctgtccggcgtgatgcagggcgagatgctggaattccccggcaacaccttcggcctcgcgctgaacctcgagcgcgactcggtcggcgccgtggtgctgggtgagtacgaacatatttccgaaggcgacacggtcaagtgcaccggccgcattctggaagtgccggtgggcaaggaactgctgggccgcgtggtgaacacgctgggccagccgatcgacggcaagggcccgatcaacgccaaggaaacggacgtgatcgagaaggtcgccccgggcgtgatcgcgcgtcagtcggtgagccagccggtgcagaccggcctgaagtcgatcgacgcgatggtgccgatcggccgtggccagcgtgagctgatcattggcgaccgccagaccggcaagaccgccgtcgctgtcgacgccatcatcaaccagaagggcaagggcgtcttctgcgtctacgtggcagtcggccagaaggcttcgacgatcgccaacgtggtgcgcaagctggaagagcacggcgcgatggaatacaccgtcgtcgtggccgccgccgcttcggactcggccgccatgcagtacctggcaccgtacgccggctgcaccatgggcgagtacttccgcgaccgcggcgaagacgcgctgatcgtctatgacgacctgaccaagcaagcctgggcctaccgccaggtgtcgctgctgctgcgccgcccgccgggccgcgaagcctacccgggcgacgtgttctacctgcactcgcgcctgctggagcgtgctgcccgcgtgaacgccgactacgtcgagaagttcaccaacggcgccgtcaagggcaagaccggttcgctgaccgcgctgccggtgatcgaaacgcaggccggcgacgtgtccgcgttcgttccgaccaacgtgatctcgatcacggatggccagatcttcctggaaaccgacctgttcaacgctggtatccgccccgctatcaacgccggtatctcggtgtcgcgcgtcggtggtgcagcccagaccaaggtggtgaagaacctgtctggcggtatccgtaccgacctggcccagtatcgtgagctggctgcgttcgcgcagttcgcctcggacctggacgatgccacccgcaagcagctcgagcgcggccgccgcgtgaccgaactgctcaagcagccgcaataccagccgctgcaagtgtggcagctggccgcgtcgctgttcgccgccaacaacggcttcctcgacaacgtggaagtgaaggacattctgccgttcgagaagggcctgcacgaccatctgaagaccaagtacgccgatctcatcaaccgcatcgaagagaccaagcagctctcgaaggaagatgaagccgccctgcgtgccgctgtcgaggatttcaagaagtccgccgcgttctaaccgcgtgattccacgacaccgccgccgcgcctggctcacgccggcgcggcgctggttcggatggagaggaagatatggccggaacgaaagagattcgaaccaagatcaagagcgtgcagaacacgcgcaagatcaccaaggcgatggagatggtcgccgcgtccaagatgcgcaaggcgcaggagcggatgcgcagtgcccgtccctacgccgagaaggtgcgcaacattgcggcgcacctggctacggccaaccccgagttcaagcacccgttcatgcaggaacgcgaagtcaagcgcgtcggcatgatcgtggtcacgaccgacaaggggctgtgtggcggcctgaacacgaacgtgttgcgcgccgtcaccaatgaactgaagaccctgcagggccgcggcgtggacgtgcaagccaccgccatcggcaccaagggcatgcagttcctgggccgcgtcggtgccaaggtgatctcgcacgtggtgcacctcggtgacaccccgcatctggaaaagctgatcggcgcgatcaaggtccagctcgatgccttcaccaatggtgaggtcgacgcggtgtacctggcgtacaccaagttcatcaatacgatgaagcaggaaccgatggtcgagcagctgctgccgctcgccgccgacaagctggttcagaccgaagaagagaagcgcgcctactcgtgggattacatctacgagcccgacgcccagaccgtagtggaagagctgctcgtccgctacgtcgaggcgctggtgtaccaggccgtggccgagaacatggcgtccgagcaatcggcgcgcatggtggccatgaaggctgcgtccgacaacgccaagaacgtgatcggcgaactgcaactggtctacaacaagacccgtcaggccgcgattaccaaggaactgtcggaaatcgtcagcggcgcagctgcggtctaaggcgtcacgaattcaagctatcggagatacgaaatgagtatcggaaatattgtgcagtgtattggcgccgtggtggacatcgagttcccccgtgacgcaatgccgaaggtgtacgacgcgctcgtgctggaagactccggcgacgcctcgttcgccgaaaagggcctgaccttcgaagtccagcaacagctcggtgacggcgtggtgcgtaccattgccctgggctcgtcggacggtctgcgccgcggtatggaagtgaagagcaccggcgccccgatttcggtgccggtcggtcacggcacgctgggccgcatcatggacgtgctgggtcgcccgatcgacgaagccggcccgatcgcctcggacgagctgcgcgcgattcaccagaaggccccgaagttcgacgaactgtcgccgtcggttgacctgctggaaaccggcatcaaggtgatcgacctggtctgcccgttcgcaaagggcggcaaggtgggcctgttcggtggtgccggcgtgggcaagaccgtcaacatgatggagctcatcaacaacatcgccaagcagcacagcggtctgtcggtgttcgccggcgtgggcgagcgtacccgtgaagggaacgacttctaccacgaaatgaaggactcgaacgtgctcgacaaggtggccatggtgttcggccagatgaacgagccgccgggcaaccgtctgcgcgtggcgctgaccggcctgaccatggccgagcgcttccgtgacgaaggccgtgacatcctgttcttcgtggacaacatctaccgctacacgctggccggtaccgaagtgtccgcactgctgggccgtatgccttccgccgtgggctaccagccgacgctggcagaagaaatgggcaagctgcaggaacgtatcacgtcgaccaagactggctcgatcacgtcgatccaggccgtgtacgtgcctgcggatgacctgaccgacccgtcgccggcaaccaccttcctgcacctggactcgaccgtggtgctgtcgcgtgacatcgctgcactgggtatctaccccgcagtggatccgctggactcgacctcgcgccagctggacccgcaggttgtcggcacggaacactacgaagtggcccgccgcgttcagcagaccctgcagcgctacaaggaactgcgcgacatcatcgcgattctgggcatggacgaactgtcgccggaagacaagctggcagtgaaccgcgctcgtaagatccagcgtttcctgtcgcagccgttccacgtggcggaagtgttcacgggttcgccgggcaagtacgtgccgctgaaggaaaccatccgcggcttcaagatgctggtggacggcgagtgcgatcacctgcccgagcaggcgttctacatggtcggctcgatcgacgaagccttcgaaaaggccaagaagctccagtaagccttgctcatcactcccgcctggcggtgggagtgatggccggccacccctgcgtgtccggccgcctgagcaaagcgattggagaaaggatctgatatggcaaccattcttgtagacgtcgtcagcgcggaagcgtcgatcttctccggccaggcgaagttcgtggcgctgccgggcgagtcgggtgaactgggcattctgccgggccacacgccgctgatcacgcgcatccagccgggtgcggtgcggatcgagaaggaagacggcagcgaagagttcgtgttcgttgccggcggcattctcgaagtccagcccaagcacgtcaccgtgctggccgacaccgctatccgcggtggcgacctggacgaagccaaggcgcaggaagccaagcgtgctgccgaagagctgatgcagaaccagagcagcgatctggatctggcacgcgctcagagcgagctcgccgtggcggctgcccaactggctgccatcgcccgcctgcgtcgtaagaagtaagcaattagtggcttgtcgcgctgttgtttttctggcgcgacaatgaaaaaggcagccgcatggctgcctttttcttgggcgtggcgatatgcttttatcccgcctggacaaaaaaaagcgcgcgggccggggaggctccgcgcggacgggaaaatcccttcgaggggtcaattcgaaggaacgggttcggtccaggtcgacaatcaaggcgcaacggatatccaatatccgaccagaggccgcaaaggccacgcgctgcaacggtctgcctggtgctccggtccagcggcgatctgctggatcggaaaatcgggttactgcttcaaaaggctttcttcaccacgcccctttaagtctgcacagccttatttactggggcgccacacgccggacaccgggtgtgtcaatgtattgtgggggaaactccccggcatggcagtaacaaaatgtatcgttttgcaagaagttgaaagccagaggcgccgggatctggcgtgttcggcatattttcacgcgttcacatcacgttagccgcagaaacgtgtcgttgtattatctttgatgacgcgatttccatgttcgctcccccaccaatccctgcgtgacaattccggttacgattcaggacgtctgtggccttcgcgttgcgtttttgcatgtccgcgggcccgcccttgtccacccggagacgcgatgcgccctgagatgcagcaagccatacaagccatgctggcgatgaagaccgtggccgtggtcggcctgtccgaccgcccggagcgtcccagtcatgaggttgcggaattcctgcaggaccatggcttccggatcgtgccggtcaatccgcgtcatgccggcgaacgcattctgggcgagacctgccacgccacgctgcgcgaagccgccgacgctgccgcggcagccggcagtcccatcgcgtgggtcgacatcttccgccgtgccgaggaaacgccgggcgtggtcgatgaggccatcgccattggcgcacagggtgtctggctgcagctgggcatcgtcaacgaccacgccgtgcgccgcgctgccgatgccggcctgctggcggtgcaggattgctgcagcaaggtcgagctgacgcgccagctcgggctggactgattcccgccccggcaccctttctttttccgctttcccatcagtcgccaaccatggccatcgacccgcaactgcttgcctattaccgccgcctggcggagcgctatgccaatgcgcccgcgcctgccgacattcccgcgcagcgggcccgttttgccgagatcgcggcggcgtcgctgttgccggatccggcaggcatcacggtgcaggacctggagcttgcgctctccggccgctcgctgggcgccaggctgttccgcccggccggcgagaccgcgccgcggctggtggtctacttccacggtggcggctgggtgatcggctcgccgcagacgcaccatacggttgcagcgttgcttgcggccgacacgggctgcgcggtggccagcgtcgactaccgcctcgcacccgagcacgcgttcccggctccctgcgacgatgcctccgaggcagtgcagtggttcgccggtgaacgtcaggcactcgggctggcgaccgatttcctggccgtggcgggcgacagcgccggcggccacctggcggcgcaggcagcgcagcagctcaacggcggcggcgcggtgcaggtcgatgcgcaactgctgatctatccggtgacggcaccggtgctcagcaccgaaagctaccgcgcctttgccgacggtcccggcctgacgcgtgacgagatggcctggttctggacccagttcatcggcgccgaggccctggcggagggcaccgcccaccccgaccaccgcgtgcacctgatggccgcgccgctggtgcgcccgcccgccaccgtgctgatggtggccgcgcacgacgtgctgcgcgacgacggcctggcctatgccgacttcctggtgcgccacgacgccccggtggtcaccatcgaggccagtggcatgacccacggcttcgcacggctgcagcccgatgccgaacgcgcgcgcgaatggatgcggcgtgccgcagcggccttcaccgggatgatcgacgacgtctgagcggcatccagccgcagccatcccttagaatggcggtcttacgaggatgaccatgaccgcactgcagaacgataccttcctgcgcgcgctgcgccgccagccgaccgaatacacgccgctgtggctgatgcgccaggcgggccgctacctgcccgagtacaacgccacgcgcgcccgcgccggcagcttcctcgggctggccaagaacccggcctacgccacggaagtgacactgcagccgctggaccgctatccgctggacgcggcgattctcttttccgacatcctgaccgtgcccgacgcgatgggcctgggcctgtcgttcgcgcagggcgagggcccgcgctttgcccatccgctgcgcaccgaagccgacgtgcagaaactggccgtgccggacatggcgtcgctgcagtatgtctttgacgcggtaagcgaaatccgccgcgcactggtccaggacggccgccagcgcgtgccgctgatcggattttccggcagcccctggacgctggcctgctacatggtcgaaggcggcggctcggacgacttccgcacggtcaaggcgatgatgtacggccgcccggacctgatgcaccgcattctcgagatcaacgcccaggcggtgaccgaatacctgaatgcccagatcgaagccggcgcgcaggccgtgatgattttcgacacctggggcggggcgctcgccgacggcatgtaccaggcgttctcgctggcctatatgcgccgggtgctggccggcctgaagcgcgagcacgatggccaacaggtgcccgcgatcgtctttaccaagggcggcggcctgtggctcgaggcgctggctgacaccggcgccgacgcgatcgggttggactggaccgtcaacctggccgaagcgcgccgccgcaccggcgggcgcgtggcgctgcagggcaatatcgacccgaccgtgctgttcgcccctgaggccgcgatccgcgagcaggtgcgcggcgtgctggacagctatgccgccgccgggggcagtgatggccacgtattcaaccttggccacggcatctcgcagttcacgccgccggataacgtctcggtgctggtggatgaagtgcatcgccacagccgcaagctgcgcgccgggcagaagtgacgatgacagtatgcggccggcctggctgctgctgcggtgccctgcgctgcagcgcaccggcgccccagcgtacccagtgctgcgggagccgcgccgccggaccctgtcaagttaactttttcgccagcattcgccaaaaaggtgctcggacttgactggcggtacttgacttatgcacaccaataggtttgccgcagtgcggaacagggttattccctaacctatccgggggatgtttgcaagcccttgatttttaaggatttggaagaattgcaaaggaaggcccgatgccggtggatcccttgtttcgcggggcttcccggccagccagtgcgacttttcaacaaagttatccacaggggcggtggaattagtggaaaaccagtcatctatcatcgacttagggccacatttgaagttttactttaagttgatgttgcgccgcacactagatttccactcttattgcgccaggcgcccgttgcacaaaggttgcgcaactgcggtgcaccaggaagggccgcatggcgccagctagcggcgcgcttccggtggtcgagaacagcacggcgatgggcgccgtgatgccgaccgccgccgcgcagtcagtcatccgggtcgcgctggacacccccgccgacgactgcttcgactatctcgccacgcccgaggtcgccccgggtgacctggtggtggtgccgttcggtcgccgcagcatggtcggcgtggcggtggcgtacgccgacagctccgatgtgcccgccgaccggctacgcccggtggcgcagcgcctggaatggatgccgccgctgcagcccgactggatcgggctggccgcctttgccgcgcgctactaccagcgccgcctgggcgaagtgatgctgccggccttgccgccggccttgcgcgaggccgagggctggccgggcctggcccagcgtgcccgcaccgacgaataccgcctgctgcccgggcatgcagaggccctgctggccgccgtgccgccacgcgcacgcagcgtgcgcgccctggcacaggcgctggccgagcgcgccgccgcggccgagccgctgacgctggccgacgcccgcgtgctgtgcgcggcggcaccggcgcggctggccgaatggcaggccgccggctgggtcgaggccagtcgcaccgcgcgccccctgctgccgaccgaccccgcacagccgccatcggccgcgccgccgctgcacgacgagcagcgcgccgcggtgcaggcaattgccgaggccgagggcttcgcgccgttcctgctgcacggggtgaccggcagcggcaagaccgaggtctacctgcatgcgatgcaggcgctgctcgaacgcgacccccaggcccaggtgctgatgctggtgcctgaaatcaacctgaccccgcaactgcaggcccgcatcgctgcacgcttcccgcacctgccgctggcggtgctgcacagcggcctggccgaccaggagcgcagcctgcagtggctggccgcgcaccgcggcgaggcccgcatcgtgctgggcacgcgcatggcggtgatggcctcgctgccggcgctggcgctgatcgtggtcgacgaggaacacgacacttcctacaagcagcaggaagggctgcgctactcggcgcgcgacctggcggtgtggcgcgccaagcagcgcggcattgccgtggtgcttggttcggccacgccgtcgatggagacctggtggcgggccgggcagggcacttaccgcaagctggtgctgcgcgagcgcgcccaggccgaagcgaccctgccgacagtgcgcctggtcgacctgaaccacgagcgccagcgccagcgcccgctgttcgaaggcttgtcggtgccgctgctggaagccatcgacgcgcgcctggcgcgcggcgagcagagcctgctgttcctgaaccgccgcggctacgcgccggtgattgcctgcgacagctgcggctggctgtcgggctgcccgcgctgctcggcctacctggtgctgcaccgccccgaacggcgcctgcgctgccaccactgcggcctggaggcgccggtgccgcaccactgcccggactgcggcaacgtcgacatcgcgccgctggggcgtggcacgcagcgcatcgaagaggcattggcgacgcgcttcccgcaggcgcgcatcgcccgcatcgacgcagattccacgcgccgcaagggcagcgcgcaagccatgttcgacgaagtccatgccggcgaagtcgacatcctggtgggcacgcagatggtggccaaggggcatgacttccagcgcgtgaccctggtcggcatcgtccatccggacgcggccatgttcagccatgacttccgcgccgccgagcatctgttcgcctcgctgatgcaggtggccgggcgggcagggcgggctggcttgccgggcgaggtgctgatccagacgcgctacccggacaccccggcattgcaggcgctgacgcgccacgactatgatggattcgcggccagccagttgcgcgagcggcgccaggccgggttgcccccgttctgctaccaggtgctggtaaccgccgaccacggccagctggagcgggcgctgcagttcctggaagtggcgcgccggcatgccgaaacctgcgagctggcggccgaggtgcaactgcacgatccggtgccgatgtcgatggtgcgcatcttcaaccgggagcgtgcgcagatgctggttgaggccacctcgcggccggtgctgcaacgcttcgtggctgagtgggtgcagactttcgcagatgtggggacggaggcaaaaggggtgcgctggcagcttgagatcgacccgttgcggatctgagtcagctggcgtggcagtgaaaggtgcaaccctggcattagggttttcgatagggttgcactaggttgcaccttggtgattttcgggagtaagatcgcgccagctcacaggctgcggccggtcgcgcgcccgtgcctgccggcatggacgaggtagcaccggcggcggctccagtctttcggagaaatgcccgcatggccaccaccactctcggcgtcaagctcgacgacgcctcgcgcgaccgcctcaagcgcgttgcccaatccatcgaccgcacgccgcactggctgatcaagcaggctatcttcacctacctcgagcagatcgagcgcggccacctgccgcacgagaccggcgccgccggtagcgccgacgcggatggcgccgacggagccgagctggtccatggcgatgcgccgcagccgttcctggagttcgcccaaagcatccagccgcaatcggtgctgcgtgctgccattacctctgcctatcgccgcccggaagccgattgcgtaccggtgctgctggagcaggcgcgcctgccgcagcagcaaggcgaggccgccatcaagatggccaagaccctggccacgcggctgcgcgagcagaaggtcggcagcggccgcgagggcctggtgcagggcctgatccaggaattctcgctgtcgtcgcaggaaggcgtggcgctgatgtgcctggccgaggccctgctgcgcatccccgacaaggccacccgcgacgcgctgatccgcgacaagatcagcggcgccaactggcagtcgcacctgggccagagcccgtcgctgttcgtcaacgccgccacctggggcctgctgctgaccggcaagctggtcgccacccataccgaatcgggcctgaccaaggcgctcacgcgcatcatcggcaagggcggcgagccgctgatccgcaagggcgtggacatggcgatgcgcctgatgggcgagcagttcgtcaccggcgagaccatttccgaggcgctggccaacgcgcgcaagtacgaggccgaaggcttccgctactcctacgacatgctgggcgaggccgccatgaccgaggccgacgcgcagcgctacctggcctcgtacgagcaggccatccacgccatcggccaggcctcgcgcgggcgcggcatctatgagggcccgggcatctcgatcaagctgtcggcgctgcacccgcgctacagccgcgcgcagcatgagcgcgtggtgggcgagctgtacgagcgcctgaagtcgctgacgctgctggcacgccagtacgacatcggcatcaatatcgacgccgaggaagccgaccgcctggagatctcgctggacctgctcgagcgcctgtgcttcgagcccgagctggcgggctggaacggcatcggcttcgtggtgcagggctaccagaagcgctgcccgttcgtgatcgactacctgatcgacctggcccgccgcagccgccaccgcctgatgatccgcctggtcaagggcgcctactgggacagcgagatcaagcgcgcccagctcgacgggctggagggctacccggtctacacgcgcaaggtctacaccgacgtgtcgtacatcgcctgcgcgcgcaagctgctgtcggtgccggacgcgatctacccgcagttcgccacgcacaatgcgcatacgctgtcggccatctaccagatcgctggccacagctactatcccggccagtatgagttccagtgcctgcacggcatgggcgagccgctgtacgaccaggtggttggcgccaccgcggacggcaagttcaaccgcccgtgccgcatctacgcgccggtcggcacgcatgaaacgctgctggcctacctggtgcgccgcctgctggagaatggcgccaatacctcgttcgtgaaccgcatcgccgacgacaccatctcgctggacgagctggtggccgacccggtcgccgtggtcgaagccatgcaccgcgaagaaggcgtgctgggcctgccgcacccgcgcatcccgtcgccgcgcacgctgtacggcaagagccgccccaattcggccggcatcgatctcgcgaacgagcatcgcctggcgtcgctgtcgtcggcgctgctggcaggcaccagcgagcgcttcgtggccgagccgctgctcggcgccgaggtaccgcgcgcagccgacgccatcaccacgccggtgctgaacccggccgaccaccgcgatgtggtgggccatgtcaccgaggccggccaggccgaggtcgacgccgcgctgcaggccgccatcaacgccgcgccgatctggcaggcgacgccgccggacgtgcgcgcggccgcgctggagcgcgccgccgacctgatggaagcccagatgcagtcgctgatgggcatcatcatgcgcgaggccggcaagaccttctccaacgccatcgccgaagtgcgcgaagccgtggacttcctgcgctactacgccgccgaggtgcgccgcagcttcgacaacgagacccaccgcccgctgggcccggtggtctgcatcagcccgtggaacttcccgctggcgatcttcaccggccaggtggccgcggcgctggccgccggcaacccggtgctggccaagcccgccgagcagaccccgctgatcgccgccgccgccgtgcgcctgctgcgcgaagccggcgttccggccggcgcggtgcagctgctgccgggccgcggcgagaccgtgggcgccgcgctggtcggcgacgcccgcgtcaagggtgtgatgttcaccggctcgaccgaagtcgcgcgcatcctgcagcgcaacgtcgccggccgcctcgacgccgccggccgcccgatcccgctgatcgcggagaccggcggacagaacgcgatgatcgtcgactcgtcggcgctggctgaacaggtggtgggcgatgtcctcagctccgctttcgattcggccggccagcgctgctcggcgctgcgcgtgctgtgcctgcaggaagacgtggccgaccgcgtgctggaaatgctcaagggcgccatgcaggaactgaacatggccaatccggaccggctctcgaccgacgtcggcccggtgatcgacgacgaagcgcgcggcaatatcgtgcgccatgtcgatgccatgcgcgccaagggccgccgtgtccatcaggccgaccccaacgccgcgcagggcgccagctgccgcaacggcaccttcgtgccgccgacgctgatcgaactggatagcatcgaggaactcaagcgcgaggtgttcggcccggtgctgcacgtggtgcgctttccgcgcgcggcgctggacaccatggtcagccagatcaacgccaccggctacggcctgacgctgggcatccatacccgcatcgacgagaccatctcgcacatcgtcagccgtgcccatgtgggcaacctgtatgtcaaccgcaatatcgtcggcgccgtggtgggcgtgcagcccttcggcggcgaaggcctgtcgggcaccggcccgaaggcgggcggcccgctgtacctgcaccgcctgctgtcggtctgcccgcaggacgcggtggtacgcagcgtgcgcgcgtcggaagcaggcggcggcgccgaggcggccacgctgcgcgacgaggccgcagcggccttccaggcctgggccagggccgagctgccggcggtggccgccgcctgcgagcgcctggccgaggcctcgccctcgggcctgaccgtgacgctgcccggccccaccggcgagcgcaacacctacaccctgctgccgcgcgagcacgtgctgtgcctggccacgcaggaggccgatctggcgctgcagctgggcgccgtgctgaccgtcggcgcagacgccgtatggccggaaaaccctgtcagccgggggctgtttgcgcgcctgcctaagggcgtacaatcgcgcgtccgcatggtggccgactggaccgcggcggacatcgctatcgatgcggtgctgcaccacggagattccgaccagctgcgcacggtgtgcgagcaggtggcggtgcgccccggtccgatcatcggcgtgcagggcctggcgcaaggtgaaccgaatatcgcgctcgaccgtttgctgatcgagcgctcgctttcggtcaacaccgcagccgcgggcggcaatgccagtttgatgacgatcggctgaggcaaccctcggacctcgtcatgtcgaagcacgcagcggtggcggcgatcccgcccggttgcgtattgaaacaaggtgcggcactgccaggctgcaccgctataactgccggcaacggcaccacatcggcaccatttgggacccaaggagatctgatgagctcgacattccacaagacggcaatgaccgttgccctgaccctggctggcctgaccgccgcctccgccgcgttcgcgcaggcccaggaaatcaagctgggctttgccggcccgatgaccggcggccaggcgcagtacggcaaggacatgcagaacggcatcgtcctcgcgatcgaggacatgaacgccaccaagcccaagatcggcggcaaggaagtcaagttcgtgctggtctcagaagacgaccaggccgacccgaagaccggctcggtggtggcgcagaagctggtggataacggcatccagggcatgctcggccacttcaactcgggcaccaccatcccggcgtcgatggtctacaaccgcgccggcattccgcagatcgccatggcgaccgcgccggaatacaccaagcaaggcttcaagaccaccttccgcatgatgacctccgacacccagcagggctcggtgatcggcgccttcgtggtgaagaagctgggcgcgaagaacatcgccatcgtcgatgaccgcaccgcgtacggccagggcctggccgacgagttcgagaaggccgccaaggccgccggcggcaagatcgtgcgccgcgagttcaccaacgacaaggcggtggacttcaaggccgtgctgaccaacatcaagcgcagcaacccggacatcatcttctacggcggcgccgagacccagtccgcgccgatggccaagcaggtcaaggaactgggcatgaaggccccgctggtgtcgggcgaaatgtccaagaccgacaacttcctgaagctcgccggcccggccgccgaaggcaccgtggtgtcgctggccggcctgccgctggaccagatgcctggcggctccacgtacgagaagaagtacgagaagcgctttggctcgaaggtgcagacctactcgccgtacgcctacgacggcgccaccgcgatgatgtcggccatggtcaaggccggctcgaccgacccggcgcgctacctgccggtgctggctgctaccaatatgcagggcgtgaccaccaagacgctggcgtatgacgcgcgcggcgacctgaaggatggtggtatcactgtctataaggtggttggcggcaagtggacggtgctggagacggttggcgggaagtaagctgctggctggttttggctatgggagaacgctgcctttgggtggcgttttttcttttgggggcttggcggcaagcctcccaaacaattccgtatctcccccattggcgcataatcccgcactcgcacattttttcaatccataggagcagtacgtgtccgagcaggaagccagctacgaccacgccatcgggctagccaaccaggggcgcttcaccgaagccctgcagattgccgaccagctgtcgcaggcccgccccgaggtggttgatttcgtcacgctgcgggcgcggctgcactttgacaacggtgacgccaacgccgcgctggcggtgctggacgaggcgctggcgcggcttgacacgctgccgctgcagccgccgcaccgctgggcctcgcgcggggtgatcgcgcaccgctacggcgccatgctgatgagcctgggccgcgatgccgaggcgcgcccgtggctgcatgaggccgcgcaacgcagcggcctgctgacgggcgaatgggccgcgcatttccacgccggcctggccgcgctgcgcatgggcgacatggccgccgcggcacgctactggcatgacctgatggtccgcaatcccgacctgggcgcagatgacatcgcaccactggtgacggactacatcgcccgggccgaggccgccggcgttccggtggagcccctgatgcgcgtctgcctgggccgcgtggccctggacaatccgcatctgctggagctcgatcccgcagccggtgacgccgtggccgccgaccaggccgcccgtgtgctggccgagcaccctgaccaccccgaggcgcgccgcctgcgtgcaccgctgcgccacggcgtgggcgacgtccagggggcactggacgacctggcggtctacctgcgccaggtgcccgacccgcagagccaggtacgcgaactggcctggcgccaccagctggcgcagcgcgccgacagcacccagccggccgatcgcgagccgtggctgcgcttcacgctgaccgaccagtccgacgacggtgccggctactaccgcgccgccatggcgctgggcgagttcatcgacgaggtgccggccgccgaggccgcgctgcggccggtgcttgtgcaggccggccgtgccggcgtggcgcgcttcgaccagtatttcgccaccggccagggcgatgccgcggggcacggcggcaatgccgacccgcatgtctattcgctgctttgccggctgctgtcgcgcagcctgccggccgacgccgcgcacgtggacgagcgcatcgcgctgcaccagcagggcatggccgccagcgagttcatcgatcactggatcgacctgctcgactgccacgccgacgccggccagcaccagaaagtagccgagctggccggcgaggtgctcaaccgctacccgctggagcgtaacccggccgacgtgacctgggccttcagccgcatgatcgcggccttgaaggccatgggcggcgccgagccgaccgaggccgcccgtgccgcgatgatgcatatggatgcccggctggacgcgctgccggtggaagcccgcagcgaggccgcgcacccgatggcgcatgcgcgcgcgcactttgccgcgctgctgcaggcgcaggcggccggcatggacgagcacgaccgcaccgatgccctggccgagatcgaggcccagcagcgccgcgcgctgctggtcgaggacgcctggctgtacaaccgcttcggccaggtctggcgcgacgcgggcgagcccgagcgcgcgctgccgctgttcgaacaggccgtggcgctgaccgagggcgatccgctggaccaggccggcccgcgcgtgcagcgcgggctggtccaccatgcagcgcggcgccacgatgccgcgctggccgactttatcgcagccttcgccgtgcgtgacgactgggatgccgaggtgtacctgcgcgcggtgcagtcggcgcttggcctggaccagcgtgaaaccgcgctggggtatttcgaaaaggcccgtgcccgcggggccgcgcagggctcgacgcgcactttgtacgcacaggtggaggccgcgctcaaggcaacccgcccgatgtggaaagtctggggcgtctgaaacgtcgctccgggccgccgaacggtctgaacatgtaagggatgtaaaaaacgccatccggagatggcgttttttacgtgcagatgacagaagttgtgcgcgtgttttgtgcggtgtcggacaatcactgacatggattgtgaagtgcttacattaccatgtcgccatgaatggactgagccaactttttccaagcctcccgctcgcgcccggcggcctgttctgggtcgggctggcgctggtcggcgccggcctggccggtgagctgagccggcgctggctgcgctgcccgcgcatcgtcgggtatgccgcggcggggctttgcgccggcatgctggggcgcggcatcgtcgacgagaacatgatcaaccagacccgtatcctgatcgatatggcgctggcgctggccttgttcgaactcgggcatcgcctctcgctgacctggctgcgcgccaaccgctggctgctgctgaccagtgcctttgaaagcctgctgacctggggcctggtggcggcggtgctgcaatggatcggcgcctcgcccggcgtggcgatcctggccggcggcatcgcggtcagcacctcgcccaccatcgtgctgcagctcaagaatgagttgcgcgccgacggccaggtcaccgagcgcctgatggcgatggccgcactcaacagcatctacgccgccgccatcgtgcaggtcgccaccggctggctgcattcggaatacggcaacctgggcgcggcgctgctgcatccgctgtacctgctggtgggctcgtgcctgctggcgtgggtggtgggcaagctcggccatgccatctatgaccgcatgtcggccgacgaccactacagcttcctggtgctggtgggcctggtgctgttcacgctggcgctgacccgggtactaaaattgtcgatgccgctgacgctgatgctggccggtgtcgtgttcaagcaccaggacaaccagccgcatgtgtggccgccgcatttcggcagcgccggcagcctgctgatcatcgtgatggtggtgtcgctgggcctgccgctgacggcacaggactgggccgtgggcggcgtttacgccatcgcgctggtggtgctgcgccatgtggccaagctggccggcgtggtctcgctgggctcgttctcgggcctgagcctgcgccagtgcatggcgctggggctggcgctggcgccgatgtcgggcctcgcctacctgctgatgcatgacgtggcgcggctctaccccggtaccggccagccgctggcggccatcatcctgtgcgcgctggcaatcgaacaacttttcggtccggtgatcgcggcctgggcgctgcgctacgcaggcgaagtccgcgtcgacatccgggccaatggaggagggcgctgatgtcgctcgaaacgttcaagcactctgaggcgctgaccttcggcgtggagctggagctgcagctggtcaaccggcatgactatgacctggccccgttcgcgcccgacctgctgcgcgcgctcaagggcgccgagcatgccggcgacatcaagccggagatcagcccgtcgatgatcgagatcagcaccgggatctgccacacctaccagcaggcgctggaagagctgaccgtgatgcgcgacctgatggtggcggcctcgcgctcgctgaacctgggcattgccggcggcggcacccacccgttccagcagtgggccgaccgcaccatctcggattcgccgcgctaccagtacatctcagagctgtacggctacctcgccaagcagttcacggtgttcggccagcacgtgcatatcggctgccccagcgccgacgaatcgctgttcctgctgcacgccatcggccgctatgtgccgcactttgtggcgctggcggcatcctcgccctatgtgcagggcgtggataccggctttgcctcggcgcggctgaattcggtcgcggccttcccgatgagcgggcgggcgccgttcctgctgacgtgggacgccttcaccgcgtatttcgagaaaatgcgcaataccggcgtgatcgagagcatgaaggacttctactgggatatccggcccaagcccgagttcggcaccatcgaggtccgcgtgatggacacgccgctgacggtgcagcgcgcctgcgatatcgccgcctatatccagatgctggcgcgctacctgctgctgtcgcgccccttcatgccgcaggaagacgattacctggtgtacaccttcaaccgcttccaggcctgccgtttcgggctggagggggagtacgtgcatcccaacgaactgacgcgcatgccgatcgccgaccacatcctgtcgatctgcgacgcgctggtgccgcacgccgaggcactcggctcgctggaggcgctggccaatatccgcgcgctggccgagcgccgcgacggcgacgccgagtggctgcgccaggtcgatgccgatgcgcgcagccagcgtgaaacggtgcgcaaggcgtgtgaccggtgggctgcctgagcctgagcctgcgccaggctgccccttgtcctatttgacgctgtagccgcgcccctgcatgcaggcgccccaggcctggtagtacgagcccatcgcctggctggtattggccgccgcctgctggttggccgcgttcgcctggcggcgcgactgccggtgcgccacgccgccccccaccgtacccgctgcagcgccgaccgccgcacccttgccggcatcgcctgccatcgcgcccaccaccgcgcccgccgcggcgccgcccgcggcaccccgcacgcgctggccgctctgcgcctgggccggcggcggggcgttggcggcctgtgccggatccacgccggtctgctgcttggcccagctgtagcaggcgccgtcgtcgctggcctgctgttgctgactctggcccttggccggataggccatgggcttgttctgcgccatggcctgagccgggatcagcgccggggtcagcgcgatcgccgcggccagtacgccgaggccacggtacagcttgcgatgcgggcattgcttcatgatgatgttcccccacgggtgtcggctacgcgacgctggacgcaccgaccggtgcgcaagtggcgagccgttctgtgaaggccagtatttgcggcacgcaggggtaagtcaaatcagcgttttgacggcccgatgttatttgtttgtagtgggtggcgaggacagcaggaacgcgaccgcttcctgccaccaggccgtatcgacatgcccggcccagtcgttatgcccggcgccgccgatcaccgcgagccgccgcggttcgcccagcgacgcatagagcgcctggccgaagcgtgccggcacgatggtgtcgcgttcggcgaccgcgaccatcaccgggcggccgaagccttccaggttggccgcgctgtcgtagcggtcgcgcagcacccagccggccggcagccagggatagtgatgcgaggcaatatgcgcaagcttgtcccacggcgtgatcagcagcacgccggcgacgctctcgcgctggcgcgccgcggccgctgcggccacgcccgcgcccagcgactcgccgaccagcagcagcgggccgccgaactggcgccgggccagcgcaatcgattgttccgcgtctgccacgaagctgcgctcgccgagtgcgccggtgcgcgggccgtaggccgggtactcggccaggatcacgcgaaggcccagcttcgtcagcgcgctggcgtagtagccacgatgcccggcgtgcccggcattgccgtgaaagaccatggcggtggcgcgcgccggtccggccggttcggcgacaaggccgcgaaagtcctgcggccccggccaggcgcgcagcccgggcgagaccatggcgtcgaccgaggctttatcgggaaagtagaggaagtgatcctgcatcatgctgattccggcaagcaggaccagtcccgcaccgagccagcgcagcaccctgcggcgaaccgattcagtccgcggcgacaccagccgcgctggcgccggtgccggggcgatggcaggcatggcaacgcgctcaggcgcaggcgaacacaggttcgcagcgcacctcggtcctgaccgagttggcgataaagcaggcgccatgcgcggcgtggtgcagggcatcgagttcttcgcgcgtgggctcgcgctcgccgccaaacgtcacctgagggcgcagcgtcaccacggtcatcgccgtctgcccgtccgcgttcttttccatcacaccggtggccgcatccaggtagcggtcgacgacaaagcgttgcttcgccgccagcgacaggaaccacagcatgtggcagctggacagcgaggcgatgaacatctcctcgggatcgaccgcgctcgcatccgacatcggcaatggcaccacatggggtgatgacgatcccgggacttccgcgccaccgtcaaagcgcagcacatgcctgcggctgtagcggttgccggcgaaatcctgcccgtcgcgttgccacaggacttcagcggtgtaagtggacatgcaaagactcctaacgttaggaaaacctcaggcgccgtgcggcacgctttcgccgtcgcgcaggcccaggcgctggttggccgccacggcgacatcgatcagcttcgggcgcggcaggttcaggttgcgcatcatctcgatgaactcttcacgcgtgcggccggcgacgcggctgttgtgggcgcgctcctggccgatggtggacgaggtgcggcccttgtagtcgtgggccggatagacctgcgtgtcgtcgggcagcgcaaacagcttcctggtcaggctgtcgtagagcgtgccggcgtcgcccgactggaagtcggtgcggccgcagccgtcgatcagcagggcatcgccggtgaagacgcggcgcacgatgccgtcgggcgtgggctcttcccacaggtagctcatgctgccggcggtgtgcccgggcgtatggatggcgcgcagcacctgcttgccgaaggcgacagtgtcgccgtcgatcagctgcttgtgcgcgggcttgatatcgcagccggacggcgccgcggtgtgcgcgccggtctgcagcgcaaggtggccggccgaggtgatgtggtcggcatgggcatgggtctcgatgacccacgccagccgcgcgccggttgacttcagcagcgccaggtcgcgttccagctggtggtcgaccggatcgatcagcagcgcgtccccggtggcggcgtcgatcagcaggtaggtgaaggtggacgaggtgtcgtcgaacagctggtggaaggtctgcatggctgccctcttgtttttcgttcggggaacgccgccatgatacgccgcgctgcgcgcgcggacattagcattccacgatattcaccgccagcccgccgcgcgccgtctccttgtacttggtcttcatgtcggcaccggtctcgcgcatggtcttgatcaccgaatcgagcgatacgtagtgcgtgccgtcgccgcgcaaggccatgcgcgccgcgttgaccgccttgaccgaggccattgcgttgcgctcgatacacgggatctgcaccagtccgccaaccgggtcgcaggtcagcccgaggttgtgctccatgccgatctcggccgcgttctcgacctgcgccgggctgccgccctgcaccgccgccagcgcgccggcggccatcgagcaggccacgccgacttcgccctggcagccgacctcggcgccggaaatcgacgcattgagcttgtacagcagcccgatcgcgcccgcggtcagcaggaagtcgaccacgccttgcttgctggcacccggcacgaagcggtcgtagtagtgcagcaccgcggggatgatgccggccgcgccgttggtaggtgccgtgaccacgcgcccgccggcggcgttctcttcattgactgcgatggcgtacaggttgacccagtccatcaccgagagcgggtcggacagggtgcgctcggcgcgctcggtcaggctgcggaacagctccggcgcacggcgcttgaccctgaatggccccggcagctcgccgtcggtgcggcagccgcgcgccacgcacgcctgcatcacatcccagatatgcagcaggccgctggtgacttccgcctcgctgcgccaggtcagctcgttttccatcatcagccgcgcgatgctcttgccactggcggtggccatctccagcatgtccttgccgctgcggaacgggtgcggcagctgctgcgcggcattgagcacctgcgtattgggtgcgcccgcggtcacgacgaagccgccgccgaccgacaggtagcgcgcctcgcgcagcgatgcaccgccggcgtcgaaggcatgaaacttcatgccgttggggtgctcggccatcgcttcgcgccggtagaaggcgatgtgctccttctcgacaaagggcacgacatgctggcccagcagggacagctcgcggcccgcgcgcagcgcggccaggcgcgtgtcgatcgaatcgggatcgatggtgtcgggggcttcccccatcaggccgaggatcacgcccttgtcggtgccgtggcccttgccggtggcgcccagcgagccatagagctcggcacgcacgctcgccacctgcggcagcaggccgtcgcgctcaagcccctgcgcgaacatcagcgcagcgcgcatcgggcctacggtatgcgagctcgacgggccgatgcccaccttgaacagatcaaagacgctgactgccacggaatgtctccagcaatgggatggccctgaagaggctcttcttggtcggttggcgtggctgcggcgggcaccgcgacaccgcgatgcccgtcatctcgagcatagttcgttggcgggccgccgcggctgcggcggcgctacgcctcagtccaccacgtagtcgctgaccggcacgcaggcgcagaacaggttgcggtcaccatacacgttgtcggcacggccgaccggcggccagtacttctgcgtgcgcagcgatgccaccgggtacgcggcttcctcgcgcgtgtacttgtgggtccactcgtcggcggtcaccaccgcggccgtgtgcggcgcgtgcttgagcgggttgtcgtcgcggtcgaaggtgccgtcggcaacgcggccgatttcctggcggatcgcgatcatcgcgtcgataaagcggtccagctcgtgcagcgcctcgctctcggtcggctcgatcatcagcgtgcccggcaccgggaagctcatggtcggggcgtggaagccgtagtccatcaggcgcttggccacgtcttcattgctgatgccggtgtccttctgcagcgggcgcaggtccaggatgcactcgtgcgcgaccaggtcgtgctggccggtgtacagcaccgggtagtacggggccaggcgcttggcgacatagttggccgccaggatcgcgttctcggtggcggcggtcaggccggccgaacccatcatcgcgatatacatccacgagatcggcaggatgctggccgagccgaacggcgccgccgaaacgccgccgatgccgcggtcgtcgcggcgatagccgacgctgtcctggttgggcaggaagtcagccaggtgcgcgccgactgcaaccgggcccacgcccgggccgccgccgccgtgcgggatgcagaaggtcttgtgcaggttcaggtgcgacacgtcgccgccgaactggcccggcgcggcggtgccgaccatggcgttcatgttggcgccgtccacgtacacctggccgccgtgctggtgcacgatctcgcaaatctgctgcacgccctgctcgaacacgccatgcgtggacgggtaggtgatcatgatcgccgccaggttcttgctgtgctgctcggccttcttcgccaggtcttgcaggtcgacgttgccgtcctcatcgcaggctacgaccaccaccttcatgccggccatctgcgccgacgccggattggtgccgtgtgcggacgacggaatcaggcagatgtcgcgatggctctcgccgcggctggcgtggtaggcgtggatgatcagcaggcccgcgtactcgccctgcgagccggcgttgggttgcaggctcaccgcggcgtagccggtggcggcgcacagcatggcctcgagctggtcgatcatctcgcggtagcccacggtctggtccagcggcgcgaacgggtggatctggctgaattcgggccaggtcaccgggatcatctcgctggtggcgttcagcttcatcgtgcacgagcccagcgggatcatggtgcggtccagcgccaggtccttgtcggccagcatgcgcaggtagcgcagcatctcgtgttcggcgtggtgcgtgttgaacaccgggtgggtcaggtattcgccggtgcgtgccagttcggaggggaagccgtcctgcgcgacggcctcgagcttgtcgaagtccacgtccgcgggcaacggcttgccctgcatgaatacttcccatagcgcgaccacgtcggcacgggtagcggtctcgtccagcgagatgccgacgcgcgtggcgctgatatggcgcaggttgatgccgcgcgcggtggccgcggcatggatggcatcggtgttgaagccggtttccagcgtcagcgtatcgaagaagctggcgttggtgcgcgcgaagccgagcttttccaggccggcggccagcgtcgcggtcaggcgatgcacacgctgcgcgatgcgcttcaggccctgcggaccgtggtagacggcatacatcgaggccattacggccagcagcacctgcgcagtacagatgttcgaggtggccttctcgcggcggatatgctgctcgcgcgtctgcagggccaggcgataggccttgttgccctgcgcatcgatggtcacgcccaccaggcggcccggcatcgagcgcttgaaggcgtccttcaccgccatatagccggcgtgcgggccgccgaagcccagcggcacgccgaagcgctgcgagttgcccacggccacgtcggcgccccattcgccaggcgcggcgatcagcgtcagcgccagcaggtcggcggcagccaccaccaggccgccggcggcgtgcacggcgtcggcgatggcgcggtagtcgttgacgtcgccgtttacgcccggatactgcagcagcacgccgaaggcgttggccgcggcggcatcggcggcggggccgaccttgacttcgatgcccatcggcagcgcgcgcgtgcgtaccacttccagcgtctgcggcagcacgtcgtcggccacgtagaaggtgttcgaatcgtgcttgttcacgcgctgcagcagcgtcatggcttcggccgcggcagtgccttcatccagcatcgacgcattggcgatatccagcccggtcaggtcggtgaccatctgctggaagttcagcattgcttccaggcggccttgcgagatttccggctggtagggcgtgtaggcggtgtaccaggccgggttctcgaagatattgcgcaggatgacgccgggcgtgacggtgttgtagtagccctggccgataaagctcttcagcaccctgttcttgcctgccagcccgcgcagccttgccagcgcggcttcctcgctcagcggctcggtgaactcgcccatcggcatgccgtcgcggcggcggatggcggcggggatgacggcgtcgatcagcgcggcgcggctgtcatagccgagcaccttcagcatgtgctgctgttcgggggtatcggggccgatatggcgggcggcgaaggcgtcgcgcgcctccagttcggccagcgtgggtcggttcacttgggcggcattcatgggaagcggggcgttcattggcaagaacctcgtggggtgcgcgccggccggtggtcagccgggacggcgcgcgtcagtctgcagtggccggtccaaccatggaccggcgcggccggcgtcaggcgccgacgctggccttgtaggcgtcggccgacatcaggccgttgacgtcgtcgccgttggccggcttgagcttgaacagccacgcgtcgaaggcgtcggcgttgacgctctccggggcagccgtggcggcctcgttgacggcgatcacttcgccggccacgggggcgtagatgtcggaagcggcttttaccgattccaccactgccagcgcgtcgccggcaccgaccgacttgcccacttcgggcagttccaggaagacgatgtcgcccagcgcgtcctgcgcatggtcggtgataccgatggtgagcgtgccgtcggcttcgacgcgtacccactcatgcgactcggtgtacttgaggtcagcggggaaattcatgaaggttctccggatacagatttgtttcttgttgggtgatgcctgcccggcgaagctgccggcaggcgagggcgaccgttggtatgagcctcagctcacgagtgccttgccattacgcacaaacggcagtttaaccacagtcgcgttgagtttgcggtcgcggatctccacctgcacggtatcgcccacggcgacatccttgggcaggcgggcaaaggcgatggactgcgacagcgacgggctgaaggtgccgctggtgatttcaccgtcaccggccggcgtgatcactttctggtgggcgcgcaggacgccgcctttgtcacgcaggatcaggccgaggaattgctggcgcgaaccggctgcggccagtgccgccttgccggtgaagtcacgctcgctctgcaggtcaacggtccaggccaggcccgcatccagcggcgaggtgttgatatccatgtcctggccgtacaggttcatgccggcttccaggcgcagcgtgtcgcgcgcgcccaggcccgccgggcgcacgccggcggcgttcagcttttcccagatggcggcgacgttctcggccggcaccaccagttcgaagccgtcttcgccggtgtagccggtgcgcgccaccatgatctcgccgagggccgggtcctggaccacggcggcgttgaagggcttgagcgtgtccgacggctgggtcgaggggaaagtgctccacactttggtgcgggcgttgggcccctgcacggcgacgatcgccagaggctgcacgcctgcaggcgcaacgtcctcgcggcgcggcgtgatggtcacatcgctgccggtggcggcattgcgcgcgcggatccattcgatgtcgcccagcgcggtgctggcgttgacgaccaggcggaagcggtcctcggcaaagaagtagacgatcaggtcgtcgatcacgccgcctttctcatccagcatgcaggagtagagcgccttgcccggggtctgcagcttgtcgacattgttggccagcaggccgcgcaggaagctgcgggtattggcgccggcgaggtcgaccacgcacatgtgcgacacgtcgaacatgccggcgtcggtgcgcacagcattgtgttcttcgatctgggagccgtagttgaccggcatgtcccagccgccgaaatcaaccatgcgggcgccgagggcgcggtggatggcgttgaggggcgtggcctggagcgtcatggaatcctctggggcagtctcggttggcgaaaacaaaaaagggccatccgccgcaacgctcgccgcgcctgaatgtggcgtggcaatccgctgcggcggatgacccctctgtcctcgatacctgagagattacaaggcggatcctgccggaccccgtcctcgtgcgccccttcggtgggcacgctcgccacgaatggcgggtgccgctctccagagttcggcatgcatcgtgtgcatattgcatgccgatccgatcggtccgtggtgcctgagagttttcgggtgataccccttcggcggcgcaggcgatgcgcgctctcccggtcggatgcgcgcaatgtacgggaggccccggcctttgtcaaacgggccaggggagcctgccgtacctgtcgctgcggtggtctggcttacttcttcttgtcgtcggtgacaacgttaccgatcacgccgcccacggccgcgccacccagcgtacccagcgcgctaccgtcggtgaggatggcgccgcccacggcgcccgcgcccgcgccaatggcggtattacgctgcttcggggtcatatccgcgcaaccggcaaaggccgcgacggtcacgccgatcagggtcaccttggtcaaagtctgcagggttttcattattggctccgatgtgatgattcaagcatgtcaaccccgccgcgcaggccagggggacatactagttagagcgtttggttgcgcgattggctccggcctttacgaagtgttacgccggtgacacaaccggccgtgtcaacgcggcttgcgctgactgacctgccgcggccagcgtgttaacatcggcagctttgccgccgtgcccgttttttgggtgctggcgtgtcccgcctggccttccgctgttcctgccgatttccctgcctccaaccgcatcccacgcatgacccatggcctgaactccgcccaatccgaagccgtccgctacctggacggcccttgcctggtgctggccggggcgggctccggcaagacccgggtgatcacgcagaagatcgcgcatctgatcgaggacaagggcttcgagccgcgccatatcgccgccgtcacctttaccaacaaggccgccaaggagatgcaggagcgcatcggcaagctgatggagggcaagactacgcgcgagggcaagcgcattccgctcaaacagctgacggtctgtaccttccactcgctcggggtgcagatcctgcgcatggaggccgagcacgtgggcctgaagccgcagttttcgatcatggattcggacgactgcttcggcctgatccaggagcagctcggcaccaccgacaagaagctgatccgcggcgtgcagggcacgatctcgctgtggaagaacggcatggtcgatccggaggcagcgatcgcgcaggccgccaatgccgacgagcaccaggccgcgctggtctaccgcaactacgtggccacgctgcatgcctaccaggcggtggatttcgacgacctgatccgcctgccggccgaactgttcgcgcgcaatgaagcggtgcagctcaagtggcagaaccgcctgcgctacttcctggtcgacgaataccaggacaccaacgcctgccagtaccagttgctcaagctgctggcgggcggctcgcacctgcgcgcgccggcctttaccgcggtgggcgacgacgaccaggccatctacggctggcgcggcgccacgctggacaacctgcgcgggctgcagaccgattttccggacctgaaggtgatcaagctggagcagaactaccgctccaccgtgcgcatcctggaagcggccaacgcggttatcgccaacaatcccaagctgttcgacaagaagctgtggagcgagcacggcatgggcgaccccatcgccatccacccgatgaacgacgaggagcacgaggccgagtcggtggtgttccgcctgtccgcgcacaagttcgagcgccgcgcgcagttccgcgactacgccatcctgtatcgcggcaaccaccaggcgcggctgtttgagcagatcctgcggcgcgagcgcattccctatgtgctttcaggcggccagagcttcttcgacaaggccgagatcaaggacatctgcgcctacctgcgcctgattgccaatcccgacgacgatcccgcctttatccgcgccatcaccacgccgcgccgcggcgtgggaaacaccacgctggaagtgctgggcacctttgccggacaggccaaggtgtcgctgttcgaggccgcgatgatgggcggtatcgaaggcaagctgcagccgcgccagctggagccgctgcgcgtgttctgcgaatcgatggtacggctggccgaccgcgcggccaaggatcccgccaccgtggtgctggacgacctgatggaagggatccactacgaggcctacctgtacgacagcttcgacgaacggcaggcgcagtcgcgctggaccaacacgctggaattcctggactggctcaagcgcaagggcaccaagcccgaaggcgccgagggcgaggaagccaccggtttcgacaatgccgacggcttcggcagcgaaggcaagaacctgctggagctgacccagaccgtggcgctgatgagcatgctggaaggccgcgaggaagatcccgacgcggtgcggctgtccacgctgcatgcgtccaaggggctggagtatccgcacgtgttcctggtcggtgtggaggagggcatcctgccgcactgccgcgaagacgaggacatgagcgacgagaagatcgaggaagagcggcggctgatgtatgtcggcatcacccgcgcccagcgcagcctgcatgtcagctggtgcaagaagcgcaagcgtgcgcgcgaaacctactcgtgccagccttcgcgctttatcggcgagatgaagctggaggaggcgcctgcgccggtggatgaaaccccggcgatgagccccaaggaccggctcggcgcgctcaaggcactgctgggaaccggcggcaagacggccccgggctgaacggggcgctacagtcccgatacaaaggcataccaggctgacaagacgccgggtgcaggcatacctggtatggcggctgtgctgctcgagccgttctactgcgtcgaatcctcgcgcagccgcgccaccggcggggtcggcatggggttgtcgatcgcggccgacattgccgcgcgccatggcggcgagctgaccctgagcaaccgccccgaaggcggcctgcccgcgcgcctgtccctaccgcgcggctgacgccgccagcgtgacgtactgcgagccgcgctgcccgtgcgtgaagtcgagcgggaaatcgcccacgtccacgcgcccctgcagtgcccgccgcatctcggccgcgccgctgccgcgcaggccggccagcgcgcgcgccagccatgccgcgccgatatagccggccagcgtggccggcgacggcggctcatccaggtattgcttcatgcgcgccacgtgttccttcaccacccgcagcgtggcctgttgcggcccgggcgcgacctgggtcagcaccatgccgccgttgtagccagcgcccaggatttcgcgcgcggcggtggcgctgaccgacgacagcccgaccaggaaaccgtaccagccctgcaccgccagcgcgcggcccagtccggcgtaggcgagggtatcgcccgccacgatcaccgcgcccgggcgggtggcggcgatgcgccgggcggcggcctcgggattggcgtcgagcggcaccgcgcgcgtcccggtctgcgcctccagccgggccagcgacggggcggcgaagtccggcgccagggccagcgcgatgctggtcatgccgtagctgcgcagctggcgtaccgccgcgtccagttcggcctggtagtcggcacgggtgaaccagacgttgtcggccgtcagcgcaaggcccgacagcggcgccacgatctgcacgccgcgccggcccagctcggccgatgccgccagcgccggcaacagccggtcgcccgggccgaacagcagctcggcgcggtcggtatcggccagcgacaccgcctgcgccagcgcgcggcgcgggtcgggatcggcgtcgcggaccacgtgcgcgatgcgcaccgggccgttgccggcgttgacggcgtcgaacatgaccttggccccggccaggtagtcgcgcgcaaggtcggcttgtgcgccgccgcggtcgagcaggtggccgaccacgaccgtgcggcgcgcctgcgacagtgctggccaggcgggcagggccagggccgcgccggcggcggcaagcaggcggcgccggtgccgggccggtgctgccaggtgcctgcgcagcggtgggtacggcggaaacatcggagtctggtcgggagttggcattgcaggggggcaggtgacgcgcgggccggcggtggcgcgcagcgtatccgccacacatgacatcaatgtgacgcctgccgcccgcaggtccaatgcccgcgcttgacggcggtcaacgcgccagcggcggtgcggccctacgatgggccgtcatacacccatacccccgcgcccccatgatcccgtctgccataacttcccctgcgcccgaccgccgcgcgctgtccgacttccgtgcgctggccggccgcatcgacggcaacggcccgcgctatacctcgtacccgacggccgaccgcttccacaacggccccgacctgtcgctgtaccacgacgcactggccgcctgccgcgccgacgcgccggcgccgctgtcgctgtacctgcatatcccgttctgcgagaacatctgctactactgcggctgcaacaagatcatcacgcgcgaccatggccgcagcgcccgctacgtcaactacctgggccgcgaaatggcgctggtggcagaccggctcgggccgcgccgccaggtgctgcagtcgcactggggcgggggcacgccgaccttcctcgaccccggcgagatgcgccgcgtgatggcgctgctgcatgagcatttcgagctggcggccgagggcgagcattcgatcgagatcgatccgcgccgcgtcgaccacgcccgcatggcgctgctggccgaactgggcttcaaccgcgtcagcctgggcgtgcaggatttcgatcccgaggtccagcaggccatccatcgcatccagcccttcgaagagacccgcgccgtggtggatgccgcacgcacgctgggtttccgctcggtcagcctggacctgatctacggcctgccgcaccagaccgcggcgcgctttggccgcaccatcgatcaggtgctggcgctgcgccccgaccggctctcggtctatagctacgcgcacctgccgcatgtgttcaagccgcaacgccgcatcgatgaaaacgccttgccgcccgccggcgagaagctcgacatcctggtctccaccatcgagcggctgagcgccgagggctacgtctacataggtatggaccatttcgcgctgcccgacgacgacctcgccgtggcccagcgcgaagggcggctgcagcgcaacttccagggttactcaacgcatgccggctacgaccaggtcgggctcggcatttccgcgatcggcgcgatcgcggggcgctacgtgcagaatgcgcgcacgctggacgagtactacggcgcgctcgaccacggccgcctgccgctggcgcgcggcgtggcgatgagcgccgacgaccacctgcggcgcgagatcatcggcgccctgatgtgcaatggagtgctcgatatcccggcgctggaagcgcgccacggcatccgcttcggcacggcctttgcgccggaactggccgacctcgccgcgctgggcgcggacggactggtgcaatgcgccccggaccgcatcaccgtgacgccgctgggccggctgctggtgcggcgcgtggcgatggtgttcgaccgctacctgcgtgaagacgccgcgcggccagcgtccacgggtgcccaggccgttgccgccaacgatggcgcgcagccggtgcgcttcgtgccgcgggcgcggtactcgcgcgtggtgtagcggccgcgcaagcggtacggacgaaaaaaagcccgcgcaatgtgcgcgggctttttgtttgcagcaggcggacttacttggcggcgttggccatgtagtccgaggcggcgatcacgtcggcgtccgggccggcgtagccacccttgggcggcatcacgcccttgcccttgagcgcaaagttgtggaccgcgtccatgccttccttcaggcgcggcgcccaggcggccttgtcgccgaacttgggcgcaccggccacgccggcggcgtggcaggcggcgcagacctgctcgtagaccttcttgcccacgtcggccgaggcggccggcgctgcagcgggtgcggcggcagcagctgccggggccgctgccgagggagctgccggtgcaggcgcggcaccggcggccggagcggcggcggcttcaggggctgcggcagtcgccggcgcggcggcagccggggcagccggttccgggaacttggcaccgccggcgtcggccatgtagaccacggcacgggccagttcgtagtcggcgtagtcgtccggcgtggtgccggcacgcgcggccatcgcgcccttgccgtttatcaccgacttcatcaggccgtcaaagccctggccgatgcgcgcggtccagtcgccggcgttggcgtacttgggtgcgcccgctgcgccggtggcgtggcacgcggcgcagatttccttgtagacctgctcgcccgtcttgaagacgcgcggcgcgttgggatccttgatttcgagcgaggcaaccggcttgatgcggtcgttgacggcttccgccgtggtggcggcgccggcgctttcagtcgagccgtgtccgacaaagttgaccagcagaatgatcacgatgatcggcaccaggaaagccgcgatcacaactgcgatcagttgcttcggggtcttgatgggagactcgtgttcgtcgtgttcgttgtggacgtcgctcatacagaactctcagttttgcaggaaaccttctggccgcttacgctcggcttgcttattctggcccggtcttggtcactcgctgaccgctgtccggccccatgcggaccgcccgtgctggctgcggcccttgcctgacttgggtctgttgctatttgcgcgctgcggactgtctcccggaccggacctgattgtcgccgacaacaagccgcgcggccttgaccccggtcgactcattgcatcggcggtgtggcgggcacgatttgacgcaaatagctggcgattatagcgccaaaggccccccgccagtgccaaaaagcggcggttgcgagacgttccctgaagcccctggcgggcccgcatggacggcacggggcaaacgcggtatcctatacgactttcctgcggcggcactcgcccgccgcaaccgctgtacccacaaaccggttgcaaaaccgtcctgtgcgcccgtagctcaatggatagagtactgccctccgaaggcaggggttgctggttcgatcccagccgggcgcgccaaaattcctcccgaagtttagtgcgatgacactggccagcttccgcagcccgcgttcgccgctggcgtggccccagttgtcgttgatgcgcttgaagcggtcgatatcgatcatcagcatcgacatcggcgtcttgtcgcgcaggcagtgctcgtactcgatgccgaagcgcgcctcgaactcgcggcggttggtcaggcccgtcagcgcgtcggtctcgggcagcgcgcgcagcgcttcgccgcgcgccaggcagtgcgagaacagcttgccaatgccctgcaaggtgacccacatcagcaacgccagcgccagcgcgctggcggccagcacggcgctcaggtgcaacgcagtgcgcagcagcaggtcggcggcggagaagtagtcgaccagcgccagggtgctgttgccgatgcgctggaacatgatgcggctgccgtcggctgcgcgcagcgtgcccgaaccgcgccggaacatttcacatcagcgggtcagcacagcgggcgcggctttaaatcgcgccctgaaaactctcagcacgcacctcgccgtgccgcgcgccagtgctgatagattcactcgatccacgcaatctcgcgcggcgggccgtgtgccgcgctcccggaaaccaccatggcaatttcgacaacgcccctgcgcaagctgggcggcgtgctggcagcactgttgctcgccggcgcagcaacctcggtgtccgctgcgccgctgagcctgccgggttcgctccccaatatggccgggcttggcattggctctaccaccgagtttgccggcggcaaggaccgcatgatcggcgtggtgccgggcctgcgttatgtcacgccgggcggccggctgctggaatggtatggcccgtatgcgcagttcaactttggcgggctaaccggtttccagtggggaccggcagtggggttgcgccttggacgcaacgacgttgacgatccggtggtctcgcgcctgcacgagatcgacaccacgttcgaggccggcggctacgtcggctatgaatacctgaaccagggccgtgtcccctggcgcttgcgcggcggcgtcaacgtgatgaccaatgccggcatcatctacggcggcacgcatatcgctgcaacgggttcgctgtgggtgccgcagcacccgcgggtctatgcgggagccggcctgggcgcgacgtgggtcagcggcagtttcaaccgcacctatttcggcgtcaccccgtcggattcggcggccagcggcctgcctgtctatagccgggcgggggcctggaacagttcaccggctggctggcgttgctctaccagttcgacaagcactggtatggggggcgatggtgtacggccagcgcctgaccggcgatgccgccgacagccccatcgtgacccagcgcggcacgcgcaaccaggtcacttacggggttggcatcggctatgcgtggcggtagtgccaccagcgcttgctatgatcccaccatgaccgacgatctcgtcatcccccatcacgaatacctgatcacggcgatccgggcgcagggtgcgggcggccagaacatcaacaaggtgtccaatgccgtgcacctgcgctacgacgtgcatgcatcctcgctcgcgcccgaccacaaggaacgcctgctggcgctgcacgaccaccgcatcacgcgcgacggcgtggtggtgatcaaggcgcagcagttccgcagcctcgaccagaaccgcgacgaagcggtgcggcggctgcacgaactggtgcgcagcgtggccacgccgccgcgcgtgcgccgtgccacgcggcccacgctggcatcacgccggcgccggctggaatccaagagccagcgcagtcaggtcaaggtgctgcggggccgggtggtcgactagcgccgcagcagtccggcttcaggtcccggtcttgaatgccgcgagcgccggcacgttgtcgccggcatccgcctgcggcggcccgaagcgcgcgcccgggcgccggtaagccggaaagaagccacccaggtcatacagcgtggctttgtcaccgccggacagcgccacgtaccggtcggggttcaccacaaggcgctgggtccggtacacatgcgtatcgtgcgaaaagccgcgcttgaactcatacagcgagtctttgaccgaacccagcccgccgcccaggtgcaggtagcgcaggccgttggtgcggccccattcgcgcgcggcatggatcacggtcttggtcggctggaggtggcggtacgcccagtcccaggcggacaggtgatattgcatgatgcccgtcccccgggccacggtgaacagcgccgcgccgagcatgcagccgtcttcctcagccacgaacagcagcaggtcgtcgcccagcgcgcgcaccagggtgcggtagtactgcgtgtcgaagaagtagtagggcaacgcgcccaggcgcgccatggtcgcgttgtacagcgcgataaagcgcggcagcctggcgaaatcacggtccaggcgtgcgctcacgccggcacgccgggcgcggttgatgccctgcctgtggcgcgcctgcgtttcgtgccatagctgctcggcactcttggtcaggtcgacggataccgtctcgccctgatccaccaccagcccgaggcggctgtcccagtcggcattgagcagtgggtgcaggcggataaaccacgacacgcagccgcactcgcgcagcagcgcgagcgccgcgcccagtgcctcctcggcaaagccggccgggacatcggtgctcaacaccgggccgccgtagccataggccgaggtggcatcccagctgccgcagccaatgggccggcgcaccagcggaaccagcaattcgtgggcgccgtcacgcaccagcaccgcggcggcgctgccgtggtcgctacgctcagcggcagtatgccagccaggcgtgtggtagcaatcatggcgacatcgcgccagcgtgtcgcgccacgcggggcttgtcggttccagcacgctcgatcgcatcgaaaactccctgtcaggtagccggcgccgcgccagagtcaggccgcggcgccgggcattgcttgccccgggcttcagcgcgcggattgcagcgcggcaatgcgctgctcaatgggcggatggctcgagaacagcgccatccacgacttgccgccggcgatgcccatcgcctgcatgttctgcggcaggccatccggctccaggccgcccaggcggcgcagcgccgccaccatcggcgtgggcgtgcccatcatgccggccgcgcccgcatcggcacggaactcgcggcggcgcgagaaccacgccacgatgatgctggccaggatgccgaacacgatctcgcagacgatcaccgtgaccatgtagccgatgccagggccgctcgattcctcatcgttcttgcgcagcatcgaatcgacgaagtagccgaccacgcgcgccaggaagatcacgaaggtgttgaccacgccctggatcagcgtcagcgtgaccatgtcgccgttggccacgtgcgcgacctcgtgcgccagcacggcttccacttcttcatgggacatcgattgcaggaggccggtggacaccgctaccagcgagctgttcctggtcgcgccggtggcgaaggcattgggttcgccatcgtagatggcaacttccggcatcggcaggccggcgcgctgcgccagcttttcgacggtctgcaccagccacagctcggtgctggtgctgggatgggtgatgacctgcgcgccggtcgaccatttggcgatggtcttggacatcagcagcgagataaaggcgccaccgaagcccatcagggcggcgaacgccagcagcgtgcccaggttcaggccattggcggtcaggaagcggttcacccccagtacgctggcggtgatgctgaggacaagcatgacggcgaggttggtcgccaggaaaagcaatacgcgtttcatgtgtatggagcagtggtgtgtagggcggtacagccaggatgcggacgggccgcagacgcgcgccgcacgctcaggcgcggcacgcaggaacaggcggacgcggccaggccgcgccggtgggactcaggcgctcggcggacgcggcagccgcggcaggtcgggttcgggcagcggggcgccggcatagcgcggcggcccggcgcggccgccccaggcggccaggcacaacggagatgccggcagcagttgctcggcaaggtcggcgccgggctgccaccgcggctcggcggcttcggaggcgggcgacggctcgcccgttgcggcaacgccggcagcgtcgtcgttgccgatgttggccgctggcgcggccgacatttcgccggtggccacctcggcgtgcgcgaacgccgccgcccagcccggcaggggcaggaaggccagcatcatgaccagcagaagtagccggagggagcgcacgaagggggacggcttatcggtagatgtaggaggaattctacaggatgcggcaaggcacaggcgccgccctgcagggtccgtcgcacgtcggcgtcactcgctcaatatgtgccgtatcagtaactcctgcaagacctgccagactggcctacactgtcgcctaccctgtagtagttacagggtagaaaacgagggccaggcaccatgcgcatcggcgaactctcccgtaccagcggctgcgatgtcgagaccatccgctattacgaacgcgaaggcctgctcgacgcgccccggcgcgaggccaacggctatcgccgctatgacgacggccacctggtccagctgaatttcgtgcgccactgccgctcgctcggcatgggcctgtcggatgtgcggcggctgcgcgagttcgagcgcaatccgtcgcaggactgcgacgacatcaatacgctgctggaccgccagatcgcgcagatccatgcgcagcgggtggcgctggaggcgctggaagggcagttgcgcgcgctgcgcgagacctgccaccaccaccagcccgccagtgaatgcggcatcctgcagaacctgcagcaggccgccgccggtgcggcctgcgaatgccatgcgggcgcgcacgaggccgggcctgctgccaacgggtgaggcgcgcaggcacgtcgctgtgctacgatggctgttcccgtgatcgcaccgctgcggtgcacgggcccggcggcagcgcagccagtgagcgatgtagtgagcaacgacttacacggctcgcctgttcagagaaccatccgctgccccttatccacccttctgcatgaccatgactgatcgccttacgccgatgcccgatgcgcctgtccgcctgatgcggaccggccgcgcgcacgcgtgcgcgatcgccacggccaacatcctgccccagcgcgccgcgagcgcggtctctccccgccggatcagcacaccgcctgattccgcccggttcccagcctgattcgtctccatagcggggcccgggccgaaccgggcccgagccagcgttttcagttttccggccgctgccgcaaggcccgcgccggattcgttgatgtccgcgctgctgcgcaaacgccagacctgcaagacctgaccgccgccgcctgccatgctggccgggccgcgccaaaccacctgactgccggaggacccgccatgacggccaccaaaacgaataccgccaccctgtacctgaccgaactcgacgtgacccgcctggagcgcatcgccagccgcgccgactcggcgcagcttgaggacatgctcgacagcctgctggcgcgcgccaccatcgtcgcgccagaagagatcccgaccgacgtggtcaccatgaacacgcgcctggtctgcaacctgccgggcgagcaggccccgcgcaactggacgctggtgtaccccgacgcggccgactttgatgccggccggctgtcggtgctgtcgccggtgggccaggcgctgctgggcgcgcgcgccggccagaccgtcagctaccggctgcccgacggccgcgagcagcaggtgagtgtcgccgggatcgcgttccagccggaagccagcggccagtacacgctttgagccgcatcctgagccaaatcccagccgcctgaggcgtgctgccggggccacgcaggcgcgtcctgcgccgcgtgtgcccggcaatccatcgacaccattcatcggcaagccagacgtttcacgactcgcaacgcaccattcgtcgcagcggtatttctgcttgcgcggactgtgactaatcttcagtccgtgctcgcatcgcaacatagattgcagggcggccggagtctcatcccggtccatacaagaaagaacgacgaaatcagttgaaggagtcccaaatgatcgccagacgtatccttggcggcgcgcttgtgttcgcggcggtcgccgcgtccgctgtggcgttggctgcccccgctgccagcaaggttggcaagtttgatgtgtacgccgatgcgctgaaggccggcaagtacgatgtgtatacggacggcgccaagcaaggcaagttcgatacatacacggacggagcccgcaccggccgcttcgacccgtactcggaaggctcgcgccgcgacggcaagttcgacagcttcaccgaaggctcgcatagcttcagcggcgagatctcgaagaaggacaagttcgataccttcagcgaaggtgcgcacaccttcaccggtgatattgccgatcgtgcgctcgacaattcccgcacgggtgacggctcgctgtacggctatcgcgtctgatcctcgcaggtcttcccaaagacctcgtgcggccactgcggtggccgcaagttttctctcccgcctgcccggctgacctcctcctccttctctcttcgccaggcaggcgcttttctcttccctcggctcgtgaccgcgttagcgcgcaggcatgctcctcatgccgaaggcggctgcgtggcggtcgagtcgtgtccgggctccggctgcgcgcgcggcaacctgcgcgcgatcgcggcatagagcagcggcaccgccagcgtacccagcaccgtcgcacccagcatgccgcccagtacgccggtgccgaccgcctgttgcgcacccgcgcccgggccggtgctgattgccagcggcaccacgcccagcacaaaggccagcgaggtcatcaccaccggccgcagccgctggcgcgccgcgcgcgtggcggcctccaccgcgcccatgcccgcgccgctgcgccgcaactgctcggcatattcgacgatcaggatcgcgttcttggccgccagccccatgatcaccaccacacccaccttgaagtagacatcgttgggcatgccgcgcagccagatcgccgcggccgcgcccatcaggccggtcggcacgatcgcgatcaccgccagcggcagggtccagctttcatacagcgccaccaggcacaggaagataaacagcagcgacagcgcgaacagccacggcgcctgcgtgccggtctgctcctgctcgaaggcgcgcccggtccagcgcacgtcgtattccggccccagctcgcgcaccagttcggccagccgcgtcatggccgcgccggtggtgtggcccggcgcgacctcggcattgatgcgcaccgagctgaagccgtcgaagcgctccagcgtgacctcgccgcgcccccattccagcgaggcgaacgcggccagcgacaccatcgcgccctgtgcgttgcgcacgtgcacgcgcgcgagctggtccggctgcatgcggaacggcgcgtcggcctgcaggatcacgcggcgcacgcggccctcgcgcgcgacttcgtcgatatagcgcgagcccagcgtggccgacagcgtgtggtgcacggtatcggcatcgacgccgaaggcctcggccttgcggtagtcgattttcaggtccagcgccggcaccggctggccggtggtggcgcgcacctcgcccagcaccgggtcctgcctggcgcgctcaagcagtttgtcgcgcgcggcgaagagcgcctcgcgccccaccggctggcgcgccaccaggcgcatgtccaggccgccgatgctgcccagttccggcagcgccgagctgttgtacgcaaacagctgcgccgcgccgcggcctggccaggtttccagcccggccgacagccgctccagcacggcctgggccgtgtgcttgcgtccgcgcgctttccagtcggtcaggccgatatacaggctggcgcgctgctcgccgctgccgccgctggaccagcccagcacggcaaagctcgaatgcaccgggtagtgctggtcgcgcatccactgttccagcccggccaccagccggcgcgtgtcggcctgcgtgctgccggcgggcagctcgacatcgaccacgatctcgccggtatcctcttctggcaggaagccgctgggcatcttccacaaggcgtagccgcatgccagcgtcaacgccaggtagaccgccagccagcgcagccgcctgcgctgcagcgcctgcacccagccggcatagcgcccggtgaaggcggcaaagcgcgcatcgaaccaggccagcggcccgcgcgccggcgccgcgctgtggcgcagcaggctggcgcacatggccggcgccagcgtcagcgcaaagaacagcgagaacgcgatcgataccgccagcgtcaccgcgaagtgccggtagatcacgcccaccgcgctgccgaagaacgccatcggcacgaacaccgcgcacagcaccagcgtcaccgccaccagcgcgcccgagacctcgcgcatcgagcgcgccgcggcctgcatcgcgcccacgccgtcggtgcgcatgatgcgctcgacgttctcgaccaccacgatggcgtcgtccaccaggatgccgatcgccagcaccacgccgaacagcgtgatcacgttcagcgacagccccagcgcatacaggcacgcgaccgtgcccagcagcgataccggcaccacgatgcacgggatcagcgtggcgcgcaggttgcccaggaacaggtacaggatcaggaataccagcaccgtggcttcgaccagcgtcagcaccacgcgcgagatcgacgcctgcacgaaggtggcgccgtcgtaagagatctcatagcgcacgtcgccggggaagcccttgctggcggcatcgagcgcggcgcgcacggtgcgcgaggtctgcagcacgttggcgccgtcggccagcttcagcccgatcgacgcggcgttgcgagtgttcagcgtggagccgtagcggtagtcgctggcggccaactccacccgcgccacgtcgcgcagcagcacggccgagccgtcggtggccgcgcgcaccacgatgcgcccgaacgcctgcgcatcgctcatcggcgcgggcggacgcacgatcgcctggaacggctggcccggcagcgccggcgcggcgcccagctggccgggggtcacgttgccgttgcgcgcgcggatggcggcctcgacctcggccgtggtcaggttgaaggcgtgcagcttgtcgggatcgaaccagatccgcagcgcgtactcggcgccgtatggctcggccttgccgatgccgggcaggcggcgcagcagcggcagcaccgagcccgcggcaaagtcgcccagcgcggtctcgtccagttgcccgctgtcggacaccagcgacacgtacatgaaggcgctgctgctggcctggtcgacatagacgccgccgcggcgcaccgcctcgggcagcaagggctcggcctgcgccacgcggttgcgcacgttgacctgcgccagctgcgggtcggtgccctggcggaagcccagcgtcaccgtggcggtgccgccctcgctgctggaatccaggtagagcaggccggggatgccgtgcatctgctgctccagcaccgcggtgacgcggtcctccaccgtgcgcgctgacgcacccgggtaatcggcatagacgatcaccgtgggcggcgccaccgccgggtactgggcgatggggatgcggttcagggccaccaggcccgctaccacggtcaggatggccagcacccaggcaaacgccgggcgcttcaggaaaaacgacgccatgtcaggtcagggctggcacgggcgcacggcaagtgaagatcggccgtggctccggtgcggttggaacggaacggcttgggtgtggagacgccgcaaggcttagcggcaagaggcgtcgagtcgcggcaaagccgggccgatgttgctgatggtgcagatctggccgcgtgtcgggtcgcctgtcggtcagggggcgcgtggcccgcagaccggggccggcgtgcaccgcggcgcttgcaggggtcctgaggggagaacccggcgctgcggcaggaaggatcggtgaggatcgacgccggcgactggccgtcgcaatgcggccttgccggcgattatagacagggaacaaagtccgggcaacgcaaacatcacattgtcggcacccttcccacgtcgggggtggagcctgcgcttacaggtcgcgcgaggcgaaggtatcgcacttgcggatatcgccggactcgatgccgcggcgcagccagcgcacgcgctgctcgctggagccatgggtaaaggcctccggcacgacatagccctgcgactggcgctgcagccggtcgtcgccgatcgcggcggcggccttcaggccttcttcgatatcgccgggctccagcaattgctggttggcgcgctgcgcggtggcggcccagacacctgccaggcagtcggcctgcagttccatgcgcaccgagagctggttggcctgcgcctcgcccatgcggcggcgcgcgctgtcgaccttgtccgatacgcccagcaggttctgcacatggtggccgatctcgtgcgcgatcacataggcctgggcaaagtcgccgctggcgccgaagcgctggcgcagctcgtcatagaaggccaggtcgatatagaccttctggtcgccggggcagtagaacggacccatcgccgactggccggtgccgcatgccgtgggtgtggcgcccgagaacagcaccagcgtggggggcgcatagcggcggttcagctgggcttcaaagatgtgttgccaggtgcgctcggtattgcccagcaccttgcgcgtgaacaccgtcatctgatccgtcgccggcgggcggttcgcctgctgctgttgctgctgcgggccggagccctgcagcaccgaggcgccctgcatgatcagcatcgggtcgatgccgaagaaataggacgccgccagcgcgacgatgaccgtgccgatgccgatggtcttgccgccgacaccgccgaatccgccgcggcggtcttcaacgtgctggctttcggcttcgtcatctaggcgcatgggggactccgggggggaggggaaattgcggggtgggaggatggcaagcagtatagcaatccagtgtcagctgctgttttcggtgccggacaccaggcccaaacaaaaaaacaccacccactcgccctggagacgggcaacgcaggcggtgtgcggcaaaacaaagaaaccgggtctgcacccggttccgtcatgacgcgaacgttccgggacgggaacgcaagcagcgcggtcaggccaaggcggcctcgcgcgcagccggtgcggttgccaccgcgctggcgccaacttcagccacgcgcagcaggttggtggtcccgccttgcccgaacggcatccccgcggcgatggtgatctggtcgccaggcacggcataaccttcggccaccgccgcgcgcgtggcggcttcgaccatttcatccacgctctgcacatccgggctcacggtggagtggacgccccaggcaatggccaggcggcgcgcgatttccaggtttggcgtgatgctgacgatcggtgcgcacggccgctcgcgcgcggcgcgcagcgcggtggcgcccgaggacgtgtaggtcacggtcgcgacggcgccgatgatctgcgtgacttcgcgcagcgccgcgcagatcgcatcctggcgcgtgttcagcggggtctcgtgctgggcgtcgagcaggttgcggtacagcgggtcgcgttccacctcggtgacgatgcggttcatcatcgacaccgccggcaccgggtagcggccgttggccgactcggccgacagcatcaccgcgtcggcgccttcatagatggcgctggccacgtccgacgcttcggcgcgggtcggcaccggcgagtcgatcatcgattccagcatctgcgtggcgatcaccaccggcttgcccagctggcggcacacgcgcaggatgcgcttctgcacgccgggcacgcgctcgggcggcagttccacgccgaggtcgccgcgcgccaccatcacggaatcggacacgcgcacgatctcttcgagctgctgcagcgcggccggcttctcgatcttggacaggatgccggcacgggtaccgacgatctcgcgcgcttcgacgatgtcggacgggcgctgcacgaacgacaggccgatccagtcagcgcccagcgacagcgcgaagtccaggtccttgcggtccttctcggtcagcgcggggatggggatcacggcgtcgggcacgttcacgcccttgcggtcggacagcgtgccgttgttgaccacgcgcgtggtgatggtgccggtggtcaccgcctcgatcgacaggcgtaccttgccgtcgtcgatcagcagcgactggcccggctgcgcggcggcgaacagttcggggtgcggcaggtagacgcgggtgccgtcgcccggggtgggatcgctgtcgagcacgaatacatcgcccgcgcgcaccgcgaccttgccggcggcgaaggtgccgatgcgcagcttcgggccctgcaggtcggccaggatcgcgatcgggcggccagtttcggcctcgatcttgcgcacggcatcgtagcgcgcgcggtggtcttcgtgcgtgccgtggctgaagttcagccggaacacgtcggcgcccgcctcgaacagttcgcggattaccgcgatgtcggtgcttgcgggtccaagcgtggcaacgatcttcgctttgcgctggcgtctcatgatgtctcctcttccattcgcggacggcgcgccatgtggcgcgccgggtaatgctgttcaggtgaacgactgcttcggtatggcggtactgcgctgacgactgcaggacctacacaatcaggatggcgcggaagtcattcacattggtgcgggtcgggccggtgacgatcaggtcgcccacgccggcaaagaagccgtagccgtcgttgttgtccaggtgcgcgcgcgccgacagaccgcgcgcggcggcgcgggtcagggtgtcgggcgagagcagcgcgccggcgttgtcctcggagccgtcgatgccgtcggtgtcgccggcaattgcgtgcacgccggccaggccgtcgagcgccaccgccagggccagcaggaactcggcattgcgcccgccgcggcccttgccgcgcacggtcacggtggtctcgccgccggacaggattacgcagggcttgctgaagggctggccgcgctgcgccacctggcgcgcgatggcagcgtgcacttcggccacttcgcgggcttcgccttcgatgcagtcggacaggatgtgggcctcgtagcccagttcacgcgcgcgcgcggccgcggcttccagcgattgctgcgcggtggccagcgtcacgttgcggtggccttcgaagcgggcatcgccgggcttgggcgtttcgccggcgccgctctccaggtgggcgcgcacgttggcggggacttcaatgccgtacttggcgatgacggccagcgcgtcggcgcaggtggtcgcgtcgggcagcgtcgggccgcttgcgatcagggtcgggtcatcgccggggatatcggaaatcagcagggtctcgacgcgggccggggcgcagtgcagcgccaggcgtccgcccttgagcgcggacaggtgcttgcgcacgcagttcatttcgccgatgctcgcgccactcttgagcagcgccttgttcacggcctgcttgtcggccagcgtcaggcccggcgcgggcgcggccagcagcgcggagccgccgccggaaatcaggcacagcaccaggtcgtcggcggtcaggccctgcaccagttccaccatgcgctgcgcggcgcgctggccggcttcgtcgggaacgggatgcgcggcttcgaccacttcaatgcgctggcaatcggcgccatggccgtagcgcgtcaccaccaggcccgacagctcgccttgccagtgcgcctcgaccgcctgcgccatcgcggcagcggccttgccggcgccgatcaccaccgtgcggcccttgggcggcgtgggcaggtgcggcggcaggcaatggctagcgctgacggaagcgaccgcggtgtcgaacaggtcgcgcaacagcgcgcgcgcgtcggactgtgcgggatgcgctgcggcgcgctggggcgagagcagggcggcttgaggttcggtggcgagcatgaaaagtcctggtgctgacggggaaagctagtcgtccccgcagggcggggacgacgtggttgctgcttacttggcgatctggtggttagacatgatctcgatcgcgcggcacagggccgaatggtcctgcttgcccaggccgttggcggcgcaggtgttgaacagctcctgcgcggtggcggtgttgggcagtgccacgcccagtgccttggcaccctgcagcgccaggttcaggtctttctggtgcagttcgatgcggaaacccgggtcgaaggtgcgcttgaccatgcgctcgccgtgcacttccaggatgcgcgaagccgcaaagccgcccatcagcgcctggcgcaccttggccggatcggcgccggccttggaggcgaacagcagggcttcggacacggcctggatgttcagcgcgacgatgatctggttggccaccttggtggtctggccgtcaccgttgccaccgaccagcgtgacgttcttgcccatcaggtcgaacagcggcttgacctggtcataggcttcctgcgggccgccgaccatgatcgtcagcgaagcagccttggcgcccacttcaccgcccgacaccggagcatccaggtacgaggcgcccagcttgttgatgcgcgcggcgaagtccttggtggcgatcggcgagatcgagctcatgtcgaccacgatcttgctgtggctggcttccttgccggcagccttgaacgcggcggccacgcccttttcgctgaacagaacggcttccacgtgcggggtgtccggcaccatgatgacgatgatgtcggcacgcttggcgacttcctcggcgctggtgcagacggtcacgcctgcatcgaccagcgcttgcggggccgggttgacgtcatgcacgaacagcgtgtggccggcggcgcgcaggtggcccgccatcggtgcgcccatgatgcccaggccgatgaagccgacgttgcgttggtttgccatgttgatgtctccttgaatgagattaagtctgtcttggttggcgtaggtggtaacccgttactgcacgccgtgctcggcgcgccagcccaggccggcttcggtggtggtcttcggcttgtactcgcagccgatccagccgttgtagccgatctcgtccaggaacttgaacaggaagcggtagttcagctcgccggtccccggttcattgcggcccgggttgtcggccagctgcacgtgcttgatcttcggcaggttggccttgatggtgttggcgatctcgccttccatccgctgcatgtggtagatgtcgtactgcacgtacaggttgggcgcattgacctggttgatcaggtccaccgcctgctgcgtgcgcgacaggaagaagccggggatgtcgaaggtgttgatcggctcgaccagcaggtcgatatgctcagcagcgagcgcgctggcggcgaagcgcaggttttccaccagcgtttcctgggcctgctcgcgcttgacgttctgcggctggatgccgaccaggcagttcagctggcgcacgcccagcaccttggcgtacttgatggcctcgcccacgccgtcctggaactcgccgacgcggtccgggtggcaggcaatgccgcgctcgcccgcttcccacttgccggcgggcaggttgtgcagcaccaggtccagctggaagcggttcaggcggtcagcgatctgatccgcatggaaggcataggggaagaggaattccacgccgcggaagcccgcgcgcgcggcggcttcgaagcggtcgagaaaaccgacttcattgaacagcatggtgaggttggccgcaagtttagtcatgagtctctccggtttagttgtgttgtcgttctgccggtgcagaaccggtgatgcaggggcgctggatttgcgcgggccgtggcccgcgcttccatgttggaatggtgccgcttacgccgtttccacttcttccttcaggatcgcttcctcgatgtcctcgaggtcttcgatcggctcgaattcgttgacgttgtcgatctcggtgcccatcgcgatattggtcacgcgctccaggatcacctcgaccaccaccggcaccgagaactcggccatcaggtcgcgcgcttcggcgaaggccggggcgatgtcttccggcttgaacacgcggatcgccttgcagcccaggccctcgaccaccttgacgtggtccacgccgtagccgttcagttcaggcgagttgacgttgtcgaaggccagctgcacgcagtagtccatctcgaagttgcgctgcgcctggcggatcaggccgaggtaggagttgttcaccaccacgtggatgtacggcaccttgaactgcgcggccacggccagttcttcgatcatgaactggaagtcgtagtcgcccgagatcgccaccacatccgaatccggcgaggcggtcttcacgccgatcgcggccgggatggtccagcccagcgggccggcctggccgcagttgatccagtggcgcggctcattgaccgacaggaactgggccgcggcgatctgcgacaggccgatggtgctgacataacgcacgtcgcgcgggaagtactggttcatctcgcggtacacgcgctgcggcttgaccggcacgttgtcgaaatcgctcttgcgctgcatggtgcggcggcgcttctgcacgtcggccacccacgacttgcggcacggcaggcggccggccatcttcatttcgcgggcaacttcaacgaacagttccagcgcggccttggcgtccgacacgatgccaaggtcaggtccgaacacgcggccgatctgggtgggttcgatatcgacgtgcacgaacttgcggcccttggtgtagacatcgacgctgccggtgtggcggttggcccagcggttgccgatgcccatcacgaagtccgaagccagcagcgtggcgttgccgtagcggtgcgaggtctgcaggccgaccatgccggcttgcagcgggtggtcgtcggccagcacgccccagcccatcagggtcggcaccactggcacgttgaccagttcagcgaactcgaccagcagatccgccgcgtcggcgttgatcacgccgccgccgcacacgatcagcgggcgctcggccgcgttcagcatcgagatggccttctcgatctgggcgcgcgaggctgccggcttgtacggctgcagcgactggtaggtgtcgacatcgaattcgatctcggccacctgcacatcgaacggcaggtcgatcagcaccggacccgggcggcccgaacgcatgatgtggaaggcttgctggaacacttgcggcaccagggccggctcgcgcacggtcacggcccacttggtcacgggcttggcgatcgactcgatatcgacggcctggaagtcttccttgtagaggcgggcgcgcggggcctggccggtaatgcagaggatggggatcgaatcggcccaggccgagtacaggccggtgatcatgtcggtgccggcggggcccgaggtgccgacgcagacgccgatgttgcccggctcggcacgggtgtagccttcggccatgtgcgaggcgccctcgacgtggcgggccagcacgtggttgatgttgcccgacttgcgcattgccgagtagaacgggttgatggccgcgcccggcacgccgaatgccgtggtcacgccttccttctccagcacggcgattgccgcgtcgattgctctcatctttgccatgatcttgtctccagtgatggtgtgaattccgttggagtcgatcctattcccgcaggcggggtgggataaacagaagggagatcagttgattcgatacctggggtacgcaatatcgccttggaagccagatcggacggtcggcgggggtacgccggggtacgcaattggatatgtggtgtgacggtgcgggcacgcagcgcagcggtgggtacggggccgcgccggccggccgccgcagcgcagtgcggcaaaatggcgggattcctcgccatccgggccgaccatgtattccaggctgccgtctacttacgaactgcttgaggcgcttgtcgccgtcccgcccgggccggccgcctaccctccggcgccgggcggccgcctcgggcgcgcgctgtgggcgggctttatcgcggcgctggtcgcgaccatcctgagtggcgcggccctggccgtctggcggctgtggctgaagcacccggtgccgccgtggtcgctgcggaccttcgaggcgctgctggccttgtcggccgcctgttacgtcggcgccggactcacgcgcgccggcaccgtgctggccaggctgcgccatccgctgcgctggcaggccgccgagatggaccgccacagcgtggccgaggatgcgctgctgcgccggctggcgcgcatcccgccgcagcagctgcaggcgcgccagcggcgtgtggtgttgcaactgcggttgtgggaaggtgctgcgcgcaccctggcagggctgctggcactggcgccggccgcggccgtggtggcggcactgccgcgccagcaggccatggccgggacgctgctgtggctctacggcgtgatggtggtgaccggcgcggcctgctacctgtacctgcacgtgcaatgcagccggccgctgcggcggctggcccatgtgctgggcgaagcggccgagatgaacgcgcaggtcagggcgcgggcggctccggccgcctgattccgcaccggcttggggtgacgcggcatgcccctggtagcggccctgacgcggccgtatgcggatgccgcgatcctgcccatcagccgcgcagggatgccacatccccggggatgccgcacaatggcgcccgggagacgaatatccgatggacaaactcaagcaaatcgaagcctttatcgccgtggtggagcacggcagcatggcggccgcggcgctcacgcagaacgtgacgccggtgatgatcggccgccgcatcaacgcgctggaagcccgcatcggcgtcaagctgctgcaccggtccacgcgccgcatcgccgtgaccgagcagggcgcggtgttcatggagcagtgcaagaaggcgctggccgacctggaccgcgccgagatgctgatcgccgaaggcaagcacaaggccaccggccacctgatcgtttcggcaccggcggcgttcgggcgcaagcacgtggcaccgcacgcgccggcgttcctctcggccaacccggaagtgcagatctcgttcaacctgaccgaccgcgtggtcgacttggtgcgcgaaggctatgacgtcggcatccgcatcggcggcgccatcgacccgaactttgtcgcgatcaagctggcctcgaacaagcgcgtggtgtgcggcacgccggcgtacttcgccaggtacggcgtgccgcagacgctggacgacctggcccagcacaactgcctggcgttcaacctgcagggcggccagcagcgcggctggtacttcagccagaacggcaagaccgtgaccgtgcgcgtcaacggcaacctggactgcaacgacggcgagctgctgcaccgctggaccggcgagggcctgggcctgggctggcgctcgacctgggagatcctgccgcagctggaaagcggcgaactgatcacggtgctggacgaatacgcgctgccggcctacgacatccttgccgtgtacccgcagcagcggccggtgccggccaagatccgtttcttcatcgagcacctgaaggcgcagttcgcgcgcccgggctactggatggacacggcgggcggcaactgaggccgccgccgagcgcgatgccgatcacagcctggctggccgacctggtggtcatcgtgcacgggctgtttatcctgttcgtggtggcgggcggcctgctggtgttgcgctggccgcgtgtcgcatggctgcacctgccggcggcggtgtggggcgtgctgatcgaatggtccggctggatctgcccgctgacgccgctggaaaacatgctgcgccgggccgcgggacaggcgggctacagcggcggttttgtcgagcgctacctgttgccgctgatctatccggccgggctcacgcccgcggtgcagctgtggctcggcgcggtggtgctggtggtcaacgtggtggtctatgcgttgtggtggcgccgccggcgagccgcgcggcaccaccactgagcggcttgcttcagcccgccggctcgaagcgcggcgcgcgcttctgcatattggccagcactgcctcgcgctggttgggtgagccgaccagccggtcctgctcgtcggactcggcctgcaggatggcggcattgtcgccgcgctccaccaccgccatcaggcgcttggccgcgcggatcgcatccgggttcttctgtgccacctggcgcgcggcttccagcgccgcggcgcgcgggtcgtcggcgaggtaggtgcccaggcccagttcgcaggcttcggtgccgctcagcacgcgcgcgctgtagatcagctcgcgcagcacgtcggggcgcaccaggccgcgcgtgagcaccatgccggccatgtcgggcaccagcccccacttcatttccatgaccgacagcctggtatcgggcgcgacgtagcgtacgtcagcgcccagcgccacctgcagcccgccgccgaaagccacgccgtggaccgcggcgaaaaccggcaccggcagttcgcgccagaccatgcacgcgtactgcgggcgattggacatgccgttggtacgcttgccgaggcggcccgcgccgatgctgtcgttgcgggattcgccgccaccgcccgacaacatgcccgccatgcggcccatgtccagccccgcgcagaaggcgcggccctcgcctgacaggaccacggcgcgcaggtcgggcatgcgcgccagttgctcgccggtctcgatcagcgcgtcgaacatggcctggtcgagcgcgttcatcttgtcggggcggttcaggcggacgtcggcgacgccgtcttcgatggtgacgaggatacgttcgttgctgctggcgctcatgcgctggctccttgtgatgcgggttctcaacggcccttgaactggggcttgcgcttctccatgaaggcggctacgccttccttgcagtcatcgctgcggctggcgcgcgactgcagcgtggcctccacttcgagctgcgcggccaggtcgttgtcgaagctctggttgagggcttccttgatcatgccgtaggccatggtcggcatggtggccaggtggcgggccagcttgccggcctcgtcctgcagcgcgtcgtcggcgtggaccttccacaccaggccgatgcgctgggcctcctcggcatcgatcttctcggccaggatggccagcgcgcgggcgcgcatctcgccggcatagcgcggcacgaagtaggtgctgccggcgtccgggaccaggccgatcttggagaaggcctgcaggaagctggccgagcgggccgccagcaccacgtcgcccgccagcgccaggctcatgccggcaccggcggccacgccgttgaccgcggtgacgaccggcttgggcatctggcgcagcgccatgatgatcgggtggtagcgctcgcgcagcagcgtgccggaatcggagatgccatccttgccgcgcgcggcaaggtcggcgccagcgcagaagccgcggcccgcgccggtgatcagcacggcgcgcacgccggcatcgccggcggcgcgctcaacgccctcgcgcagctcgcgcatcaggtcgccgttcatcgcgttgagcacgtccgggcggttcagggtcagcgtggccacgccttcgctggcttgatagaggacggatgccgtcatgggtggttctccttgttgcttggtcgtggttcggtgcgggtgcggaaacttactgcggcttcttcagcgcgtcggcggaggcgtcgcccagcttgctgccgccgtcgcagtcgaggatggtgccggtgacgtagtgcgcgttgtcgctgctcaggtacatcgcggcatcggcgatatcgtccttggtgccgtagtcgcgcagcgccaggcgggccttgtagcgcgcctccatctcggccgtgggcgccagccgcgccatgccttcggtgtcggcgatcgggccgggcgagatgccgttcacgcgcacgccggccgggccccattccatcgccaggcacttgatcagcatgttgatgccggccttggcggcgcaggcatgggcctggaacatcatggcgttgaccgcctgcggcgcggtgatcgcgatcagcgacgcacccggcttggccaggtggtcgaagctggcgcggaacacgttgaaggtgccgagcaggtcgatatcgaccaccgtcttgaaggcattggccgacatgccgaccacgggcgcgaggaagttgcccgcggcgccggagatcaccacgtcgatcggtcccagtttgtcctgggcgcgtgcgaaggccgcttccactgaggcatagtcgcgcacgtcggcggccatgccgatggcggtgccgccggccgcggtgatggtgtcggcggcggcctggatgcgctcgtcggtgcggctgatcagcgccagcttcgccccggcgcgcgcgaagccgtgcgcgatgccgaggttgatgccggaggaggcgccggcgacgaatatggtcttgccggcaaaggcgtcggggcggaaggcactgggcatgggaagtcctctcgatcgatggtcatgcgatgcgggccgcgatccggcgtcaggcaggaccgtggcgttgcgaaatgcaggggagagctagcgccggcggcgtggctgcagcgcaggtatcgcgcgatggcgcatgacggtctccatgtttctgttctggtgtgcgtccgccccggatcctgcggggggcggcgccggcctctggctcgggcctccggcatcctaacccgaagccgggattcgatctcgcgtattgccggcaatgccggccaccgcggacgcaacaatggcggcgccgggaatgccttccgggcgctgcaactagctggcgggaaaggaaaaaacgggtgcgggactgcgtcgcggccaggcggcgggacagggcgccattccgcagcgcaaaacccagtcctcagaaaaaagaaagcccgcacaccgttgcagcgtgcgggcggccttccgacgatgaggtgccggaaggcagagtgctcatgaagtgcgcccccgcgtcttcatggcggggtcaagtgtgcgcgcgggcggcagtggccgctttgactcacgtcaagcagacgcctacgcgagcagcgcggtcaccaggtccttgccgcgcgacaccggcgcggtttcctcgaaatgcagcgcaccttccacgtggcccaggtggtccaccatcagcgtgacggcccgctcgacatcgccggcacgggcggcctcgatgaattcgcggtgctcgtccgacgagcaggccgcgtcgcggcgcgactggtacagcatggtgatgaccgcgctgcgcgtcgacagctcgcgcatcatctcggtcagcacgccgttgccgaccacctcggccagcacgatatggaagtcgcccagcagccgggtgcgtacctgcgcatcgttgccacccagcgccttgcgttcggccgccaggtggcggtcgatgcgcttgtagtcggccggggtcgccttggcaacgaactcgcgcgccagcgccgcttccaggatgcggcgcaccgcgaagacctcgcgcgcctcctcggcgctgggcttggccacgaaggcacccttgtcgggcacgatctggatgaccttgtccttggacagcatcagcagcgccgcgcgcaccttggtgcggctgacgcggtagacactggccagggcctcctcgcgcagcttggtgccgggcggcaggcggtgcgaaacgatggccgcgacaatgtcttcggcgatcgcttcggcggtcatgtcaggatcgatatgctcgggcatggcagcgcacttgcgcaggggctgcgcggttggggagatggcgtgattctatcgccccggcgcagggaccggagaaccggcggtaacgccgtcctccgccatcgcggccaggccagcatccaggtcggtcgcctcgatggcgccgttgagcacgccatgggcccgttcgcggtcgatatccttctcccaggcggccaccaccacggtcgccacgcagttgccgatcaggttgcccagtgcacgcgcgatgccgatgaaccagtccaccgacagcaccagcaccagcccgatggcgggaatcgccgggtgtgccgacagcgtcgcggccaggatcacgatggccgagccggggatgccgtgcgcgcccttggaggtgaccagcgccaccgccaggatgccgagcaggtcgcccatcgccagcggcgtgttggtcgcctgcgcgataaaaaccgcggccagcgtcaggtagatcgagaacgcatccaggttgaacgagtagccggtcgggatcaccaggcccaccaccgacttcttgatgcccatgaactccagcttcttcatcacctgcggcagcacgctgtcggacgaggccgtgcccagcaccaccagcagctcggcgcgcaggtagcggatcagcttgatcaccgagaagccgcacacgcgcatgatggtgcccagcaccaccagcacgaacacgatcaccgcgccgtagaacaggaataccaggaagccgagctgcttgagcgagccgatgccgtacttgcccacggtgaaggccaccgcgcccagcacgcccagcggcgccagcttgatgatgaagcccatcatcttgaacagcgtatgcgagaaggtgtcgatcagcctgaccagcggccggcccggctcacccaccagagacagcgcgcagccgaacaggatcgacaccagcagcacctgcagcacgtcgccgttggcaaaggcgccgaacacggtattggggatcagcttgagcaggaagtcgaccgtgccctggtccttcaccttggtcgcgttgtcgataaatccggcgatggccgacgcatcgagcgaacgcgggtcgacattcatgccgacgccgggctggaacacataggccagcaggatgcccagcgccagcgcgatggtggtgacgatctcgaagtacaccaccgccttgatgccgacgcggccgaccttcttcagctcgccggcgccgcagatgccggccaccaccacgcagaacacgatcgggccgatcagcatcttgatcagcttgataaaggcatcgccaagcggcttgagcttggcggcgaattcagggaatgccaggccgagtgccgtgccaattaccagggcaatcagcacctggccaaacagcgaacgggtgaagcggatgtgcaaacggggctggggggcgccggggcggggctgcgagggaactgcatgctgcatggttgtctccgtaccgggccggtccggcgcctgtccattggctggcgctggctggcccatctgatccaggaatcaccggcggccccgtactgctctactggcgggtggctgccggccttacgttccgtgctggcttccgggtcgggagcgcgccacttcgcggatggcccccctgttgaggcggaatccacgcaatcgcctgtccggaccggattgtccgcggcaaattgtctgaacgtggaagcgaatatagtgcatatcatttttgtatgcaatttttgaattcactgtgctaacatgaatcgcacagaatagagcttcggcccgggcgccacgcccgcgccggcaggccttgcggcagacgccggcgggtcttgccggaccacccgccgcggcgttcacgcacttccagcaggagacaacgcatggcagcaaatccgtcgccgtccgccgcagagactggcacgcgcatcatggcctgggccgacgccctggccgtccacaccgagcagcccggcatgctcacccgtacctacctgaccgaggcccaccacggcgccgccgcgcagctgaccgaatggatgcagcaggccggcatgacggtgcggcgcgacgccgccggcaacgtgatcggccgctatgagggcacttcgcccgatgcgccggcgctgctgacgggctcgcacttcgacaccgtgcgcgacggcggccgctatgacggcaacctcggcgtgatcctgccgatcgcgtgcgtggccgaatggaaccgccagggcaagcgcttcccgtttgcgatcgaggtggtcggctttgccgaggaagagggcgtgcgcttcaaggccacgctgctgggcagccgcgccatcgccggcaccttcgacaacaacgtgctggacaacgtcgacgacagcggcaagaccatgcgccaggtgatgcgcgaggccggtttcgacgccgctgccttgcccgccgccaggcatgacagcagcaaggtcgcggccttcatcgaagtccacatcgaacaaggtccggtgctgctcaatgaaaacctgccggtgggcgtggtgacggcaatctccggcgccacccgctttatcgtcgagctcgaaggcctggccggccacgccggcacggtgccgatggacatgcgccgcgacgccgccatggccggggccgagatcggcctgtatatcgagaagcgctgcggcggcaagccgggcctggtcggcacggtcggccagttcaacgtgcccaacggcgccgccaacgtggtgccgggccgcgccgtgttctccatcgacatccgcgccggcgctgacgccgagcgcgaggccgccgtcaacgacgtgctggccgagatcgagcgcgtgtgcgcgcgccgcaacgtgcgcacgcaggtgcgcaagacccatgaggcgaagagtgttccctgcgccccgtggctgcaagagcaatgggccgccgcgattgcccgccagggcgtgccggtgcgccacctgccgtcgggcgccggccacgacgccatggccattgccgccatcgccgacgtcgccatgctgttcgtgcgctgcggcaacggcggcatcagccaccatcccaccgaaaccatgaccgccgaggacgccgccctgtccgcgcgcgtgttcagcgatttcgtcgagcacttccgcctgccgcagtaagccagcgcagattccccggaacccacccgaacccctccgtagttgagagaacaagtcatgaccgcacgagacaatatgaaccccactgaaaccacgctgacgcagttcatcgaccagcaccgtccggaacaggaagctttcctggccgaactggtcaaggtgccctcggacaaccccgcaggcgactgcgacgcccatggcaagcgcgccaaggaactgctggagggcctgggcttcacggtggaggcgcacaaggtgccggacgagctggtgaaggcagccggcatgatcagcgccaccaacctgatcgtgcgcaagcagttcggcacgggcggcccgaccatcgccatgaacgcccacggcgacgtggtgcccccgggcctgggctggaccaaggacccgtacggcggtgaagtggccgacagcgagcacggcccggtcatgtacggccgcggcgtggcagtatccaaatctgacttcgccacctacacctacgccgtgctggcgctgatggaagcagagaagcagggcgccaggatcaacggcgcggttgagctgcagttcacctatgacgaggaaaccggcggcgacatcggtcccaagttcctgctcgacaacaacctgagcaaggccgactacgccatctcggccggcttctcgtacggcatcacctcgtcgcacaacggctgcctgcacgtcgaagtgacggtcaagggcaagcagggccacgccgccatgccgcatacgggcgtggatgcgatcgaagccgccacccacatcctgcaagccatctacggcctgcgcgccgagctggccacgcgcaagtcgaaggtgccgggcatcgacaccgccacgctgaacgtcggcctgatcaagggcggcatcaataccaacgtggtgcctgacctggtgaccttccgcgtcgaccgccgcatgatccccgaggaaatcggcttcgacgccgaaggcgagatccgcgccgtggtggaaaaggccgccaaggaccgtccgggcatcgaagtgaaggtcgagcgcatcatcctggccgagccgctgtcggaactgccgggcgtggaaaagctgatcggcgcgctgaagagccgtgccgagtccgtattcggcgtggagatcccggtgcaaggcgtgccgctctacaccgacgcgcgccactacaccaagcgcggcatcccgaccgtgctgtacggcgccggcccgcgcacgctgatggaagcccgcggccataactcggacgagaacctgcgcctgaacgacctgaaccgcgcgaccaaggtggtggcgctggcgctgtcggacctgatgaagtaagtcatttcgattgagccggaccgccaacaggcggtcggccaacgcaaaagcgccacggagaccccgtggcgctttgctttcttgttctcaagctttccgcaatatcgcggcacaccacgcggcggactctgcttccacctgctcattcggaatgccgatgccggcacgcatcgaagccctgccttcctcaatcatctgctggaaaaggacctcctcgtcgcgtgcctgcctgcgccgcgccagatactcgcgcaccagcgcctcagcaacctgcgaggtggtaaggccctcagccgcggcctcggctatgaatgcgtcacgcaattgcgggttcagcgtgagaatgaacggggcttcttccgacaccagcatgtccaatgtccttgtaatgacgaagtatacgcattgtcgataccagggcacctgcgcgactatgggacacgtctgaacttgccgcggccgattcctcctacgccggcagcgtcgtcgcccccacccccagcacccgctgcatcagcaccgtatcgatccattgcccgtgcttgaaccccaccgcctccagccggccgacggtgcggaagcccaggcgctcatgcacggccagcgaaccggcgccttcgccgccggcggtgcaggcgatcacggcgaccatctggcgccagggaccggtctcgcagcgggcgaccagttcggccagcagggcctggcccaggccctcgccgacgcggcggtggtcgatatagatcgaatcctcgatggcgaagcggtaggcgctgcgcgcgcggtaggacgatgcataggcatagcccagcacctcgccgtcgcgcacggcgaccaggtagggcaggcccttgcggtggacttcggcaaaacgcagctgcatctcgtccaggctcggcggcgtttcctcgaacgaggcgcggccgtgcagcacatggtgcgcgtagatggcgtggatggcaggaacgtcggcgggtgtggcgtcgcgcagggtgaagggtttgcgcgtgccggcggacggcgtcgtggcggaaacggtagtggaagtcatcgggaatggcgccctatgcaaggacttggggcaacgcaggatgcgtgccggccacttgcaccagcgtgatgctgcgcgagggccggtgtcttgtatatagtgcggattgatttgcaccgcattagtgccaacgccccggggcggggcacggcaacgacaagaaaggaccctgccatgatcaccatctaccacaacccccgctgctccaagtcgcgcgaaacgctcgccctggtccaggccgccagcgagcggctgggcgaaccggtggaaatcgtggaatacctgaaagagccgccgtcgctggccacgctgcgccagttgcacaccatgctgggcgtgccggtgcgcgagatgctgcgcgacaacgaagcgccgtacgccgatctgggcctggccgatcctggcctgaccgaggccgagctgctggccgccgtggccgacaacccgatcctgctgcagcgtccggtggtggtgcgcaaccgccgcgccgcgatcggccggccgcccgagaacgtggcgccgctgctggcctgagccagcccatgcacggcaccaaataaaaccggcccccacgtggtgggggccggccggtgcttgaggcaaacagcttcaggcgggtcgtctaatgaacacccagccagtgcatggcctcctgaccgaaagcgatggccgccagtacgaccagtagcaccaccagcgtcaccgtgctgacgtatagcgtggccttggcgacttcggcgtcctcatccgaggtgtggcgatgggtgataggcgtggcgccccgcgtggcatgcggccaatggatccggccggccaggtctctcaagtgcaggtcggtatgaaaacgcatgatcgacacctcctcggcaggcgccgcgcgatccgggcaacatggctcaaacggcatatggcgtggctgcgcaagtgcgccggatagtctgtggctcgtttcgcccggtacgccatatccgcttctactataggcgcgctggcgtgggatgcgaacgcaaagcctgcaaggggcatgccgccttggctgccgcggcgcagcaaccgttcagggctgctcggacgaaggtgagggctcgctagcgtccgctgcgacatcggacgccaggctggccagtgcggcctcgcgctcacgcagcgtagcgagcatgttgcagaacagcgcaccctgttcgagcgcatcgtccagcgccacatgggtgtgcggcagcggatccatccaggcggccgggaaggccgccttgacggtcttgcggtaggggcgcccggtcagcgcaaagcccagcgtcttgatgtcgagggcggcccagccaaagggcgagcgcccggcgaaccgcatcatgtaccagaacatccaggtgaaatcgaagccggccggaaaggccacgaagaccggcttgccgggcaggctctcgacccattcgacatagcggaccatggcgtcctcggggcgctgcaggtcgcgccggcaggcgctccaggcttcgggctgggtttgccaccactgcatctgcaccgggtggccggcggcgccgggcagggtctcgaggttggcggagaacgtgcccaccacggtcttgtccgccagcattgccgcggacgcgaacgacagcatcgaatgcgggcccgggatcgggccgtcggcttccacgtcggtgctgacgtagatctccgggcgggtgtcgggcacctgtcgcttggccacggcctcagcccacgtcggtcaggtgatcggccacgaacgggttgttgcggcgttccacgccgaaggtggagaccgggccgtgcccgggaatgaaagtcacgtcctcgcccagcggccacagccgcgtgcggatcgagcggatcagatcggcatggttgccgcgcgggaggtcggtgcggccgatcgagccggcgaacagcacgtcgcccaccaccgccagccggttggcgcgcgagaagaacaccacgtggccgggcgtgtggccggggcagtggtagacctccagcgtctcgttgccgaactgcacggtgtcgccgttctccagccagcggtctggctcgaagctctcggcgtggccgaagccgaagcggcgcgtctgctcgggcagctgctcgatccagaagcgctcgtcctgctgcggaccttcgatggggatatccagctcgcgcgcgagcgctgcggcgccggcgcagtgatcgacatggccatgcgtcaggaagatcttttccagcgtgacgccttgctccctgaccgcctcacggatgcgatccaggtcgccgccgggatcgcagaccgcggcgcggccggtgctttcatcgatcagcagcgaacagttttgctggaagggcgtgacgggaatgagcagggctttcatggacgatatcttgtgcgccgggcgccttctggccgggcgccacggagtggcccgcacggacggcgggcggtgcccagcattgtagcgccgggcggcgattccccgcccgcgatgcaagtcgtgtgctttatgcattacccgcgcgaaagccccgtctcgggcgggaatcccttgccacaagcgggattccgggcagataggtcatgatcgtgcgaaatcgcacagatttcgtaacaaaatgaaagagatagtcgtaaagagtcaatgttagactgccgcccatgttacggatctccgctctcgttaagcgctggcaacggctggccaagctcggcgcatgcaccgcatgtgccgtggtgctggccgcctgtgccacgccccctgaaggcgacaacgcaagcaacgacaacgctggcgccgtgcccacgcgcgcggcaaagaacggcaaggccggcaagaccgatcgcaccgacgcagacaacaagtccgcgcgcgcctcgggcggcggcagctggaacctgttcggctatgacgcggacgatggccgcagcggcagctcgctggacggcctgcgcgccgacatcggcacgttcgagcagcgcggcgtttcgtcctggtacggcaagggcttccatggccgcaagaccgccaacggcgaacgcttcgacatgcgcgccatgaccgccgcccatccgacgctgccgctcgacagctgggtgctggtgcgcaacctgcgcaacaacaaggttgcagtgctgcgcatcaatgaccgcgggccataccacggcaaccgcgtgctggacgtgtcctacggcgccgcgcgccgcctgggcttcgtcgaacgcggcgccaccaacgtcgaaatccgccgcctgacgcgcaccgaagtggccgcgctgggtccgcagatcgatgccggcggcaccgaggccggcgacggcagcggcgacgacgacgtatccgtgccggaactggccaactcgctggcgcccgccaaggcgcgcaagtcgaccaaggccggcggcaagaccgtcaagcgcacacggcgctgaccagggcagcgccgccgcatgccgccgcgcgctgacacctctgctttaccttcctcctcccgatcccgggatcacgcgcgcaccgcgtcagtcctctgcctgccccgcgcgctgcgccagcgccagctggtagagcgcatcggtgccggcgccggtgatggcggccgccagcttggcggcgcgcttggccggcagttccgccagcagcagcgccagcacgcgctgggcctcggcatccggcaagccatccgcggcagttgcggcgccagcgccttccaccaccagcacgaattcccccttggcccggttcgggtcggcggccagccaggccggcgcctgcgccacgggcagcacggcgatgtcctcgaacagcttggtcagttcacgcccgaccagcagccggcgctcgcctggcaggcccgcggccagcgctgccagcgtgtcggcaatgcggtgcggcgcctcgtagcagacccaggcgtggtccagcgccgccagccgggcgatggcctcggtgcgcgccttgggcttgctgggcaggaagccgacaaaggtgaagcggccttcgccggcatcgagcatgtcgcccgccaccgacagcgcggccaccgcggcactggggccgggcagtggcaccaccggatggccggcggcgcgcaccgcctcgaccaggcgcgcacccgggtcggagatgcccggcgtgccggcgtcggagacgtaggcgatgcgctcgccggccgccaggcgcgccgcgatgcggcccgcggcctcgcgctcgttgtgctcgtgcacggccaccagcggccgctgcaggcccacgcgcgacagcagctggccggtattgcgggtgtcttcgcaggccacggcgtcggccaggccgagcacatgcagcgcgcgcagcgacaggtcggcgacgttgccgatgggcgtggccacgacataaagggtgccggccgggtaggactggctggccgccagggagatccagtcactcatgcttgagaacttccgttgatgccatcattcaaatccaccacgcagttgcaaaacacacagctacgcggtgcgcaggcggaggaccgggccctggcacacctgcggcgccagggccttgagcccgtggtgcgcaattatcgctgcaaaggcggcgagatcgatctggtcatgcgcgcgccggacggcacgctggtgttcgttgaggtgcgccagcgcagcggccggggcttcggcggcgcggccgccagcgtcacgccggccaagcagcggcgcgtgctgctggcagcagcgcactacctggccacgctggcgcaggtgccgccgtgccgcttcgacgtggtggccctggaacccggccggctggactggctgcagcatgcctttgaccaggatgccgccggggctggttcataatgcgcggcagaccctaaggtacgatccgcggatcgcaatggcaacaacaaggccccagagccatgagtatcgacagtatccagcaacaatttctagacagcgccgagaccaagcgacaggccgcggcggtgatggccccctatatcgacgccgccgtggaacgcatggtcggcgcgctgaccagcggcaacaagatcctggcctgcggcaacggcggctccgcagccgatgcgcagcactttgccgccgaactggtcgggcgcttcgagcgcgagcgccccggcctggccgcgatcgcgctgaccaccgacagctcgatcctgaccgcgatcggcaacgactatgacttcagcaaggtgttttccaagcaggtcgaggcgctgggccagcccggcgacatcctgctggcgctttccacctcgggcaattctgccaacgtgatcgccgccatcgaagccgcgcgccagcgcgagatggccgtggttgcgctgaccggcaagggtggcggcaccatcgccggcctgctcgatgaattcgatatccacctgtgcgtgccgagcgagcgcaccgcgcgcatccaggaagtgcacctgctgaccctgcattgcctgtgcgacggcatcgacgaggcactgctcggggaagcctgatgctgccttcctcccattcccaacatccagccacagcaaggaccgcatgacgaacctgcccactacgcaagccccccggaacggcgccggcgcgcgccatccttcccgcaccgccggccttggccgcgccagcctggccgcggcggccgtgctggtctgcgccacccagctcgccggctgcttccccgtgatcgccggcgccatggggaccggcgtggccatggccaccgaccgccgcccggccgccacccagaccgtggaccgcggcctgcagctcgaggccgagaacaccatcaactcgcgctaccgcggccaggcccgcgtcaacgtgaccgtgttcaaccgcaaggtgctgctgaccggcgaagccagcaacgacaccgtcaagcagcaggtcgagcagtatgtgcgtggcctgcagaatgcgcgcgtggtgatcaatgagctcgaggtcgtcaactcgccgggcttcatgacccagagccaggacgcctacctgaccagcaaggtcaagaccctgctgatgaccgccgacggcgtgccgtccaactcgatcaaggtcaccaccgagaagagcgtggtctacctgctgggcgtggtcaccgccgccgagggcgaccgcgccaccgacgtggcgcgcaatgcctcgggcgtgaccaaggtggtcaaggccttcgactacgtcaacgacaccgagcgcgcgcgcctggactcggcttccacctcgcagaacccgtcgttcgacggcaatgtcggcacgccggcgccggtgcagtcggtgccgggcgtgggcggtccgatcgatgcgccggccggggccgccacgggcaccaccgcgaccaccagcccggtcgccgcaccggtgacttcgccggtgacgctgccgccgggccgcaacctgccctgagcacacgcccggcccagcttcccgggccggttccgacggcgtccgctcatgcggacgccgtttgtccttctgcggttttcaccgcacacggtccctgcccgatgtgctacggtagccacgccggccgcccccaagcggaacccagtgccggccctacacggagcgagaccatgacaatcttcccccggcccgctgtgttgctgcggctggcgctgctggccgcggcgctgtgcggcgcccagccggcgctgtcggcagacagcgccgcccctgccaccgatgccgcgctgcgtgcgcgcagccaggccgccgcctgcaccagctgccacggccccgccgggcgcgcgccggcgggcagcacgatcccgccgctggccggccgcccgcaggcggaactggccgcgcagatgcaggccttcaaggccggcacgcggccggccacggtgatgcaccagattgccaagggttacagcgacgaccagatcgcggccatcacggcgtggttcgccgcggtgcgctgacagcgggggactaccatgcaaagacgaagcttcctgggcgccgcgggcgccgcagtactgggttcggtcggggtcgggtcggcacgcgccgcggcgccggccagggtggtggtggtgggtggtggctacggcggcgccaccgccgcgcgctacctgcgcgagtggagcggccaggcgatcgaggtcacgctggtcgaacccaatccggcctttatctcctgcccgctgtcgaacctggtgctcggcggcagccggcagctggcggacctgaccttgccgtacgacgcgctggtgcgccgccacggcgtgcggctggtgcgcgataccgccgtggccatcgacccggccaaacggaccgtgcgcctcgcgggcggcgccacgctgccctacgaccgcctgctgctgtcgcccggcgtcgaaatgatgagcgatgcgctgcccgggctgaagcagcccggcggcgaccaggtcctgcacgcctggaaggcgggcccgcagaccgttgcgctgcgccgccagctggaggccatgccggacggcggcacctatgccatcagcgtcccgctggcgccctaccgctgcccgccgggaccctacgagcgcgcctgccaggtggcgtactacttcaggcagcacaagccgcgcagcaaggtgctgatcctggacgccaaccccgacatcacctccaaggccgggctgttccgcaaggtgtgggcgtcgcagtacccgggcatggtggaataccggccgcagttcaacgcggtggatgtggaccccgccacgcgcacgctcaagttcgaggtgcaggacgacgagcgtgccgacgtgctcaacgtgctgccaccccagcgcgccggtgcgatcgcggtgtcggcggggctggccacggccaatggcaagtggtgcgaggtggacttcgtcaccttcgagtcgcgcgccgcggccaatatccacgtgatcggcgatgccatccagatcgcgccgctgatgcccaagtcgggccatatggccaaccagcatggcaaggtcgcggccgcggccatggtcgcgctgctgtcgggccgggcacccgacccgcagccgctctacaacaacacctgctacagcttcacctccgaccgcgaggcggtgcacgtggccagcgtgcatcgctatgacgcggcgcagaagaccatggtcacggtgccgggatcgggcgggctgtcggaggcgccgaaccagctcgaaggcgactacgcactggcatgggccaagggcatttgggcggagatgctggggtaggtgcagggcgggccatgccccgaaggccgggggctgctaccctacgggttttgtccggcactgtgccgggccgcgccccccagccccctcatgcaagccagagaccgtctactcgccctcgccatcgtctgcgtctggggcgtcaacttcgtcgtcatcaaggttggcctggcggacatgccgccgatgctgctgggtgcgctgcgcttcctgctggtggcgttcccggcgattttcttcgtgccgcgcccgcgcgtgccgtggcggctgctgctggcctacggcgtcaccatcagcctgggccagttcgccttcctgttctacgccatggcggtcggcatgccggccggcctggcctcgctggtgctgcagtcgcaggccttcttcacgctggccattgcggcgctgtggctgggcgagccggtgcgctggcacaacatcgcgggcatggcggtggcggcgggcgggctggccctgatcggggccggtgccggcagcgccggcggcatgagcgtggcgggcttcgtgctgacgctgtgcgcggcgttctgctgggccagcggcaatatcgtcagcaagaagatcggcccggtcgacctgctggggctggtgatctggggcgcgctgatcccgatcgtgccgttcgccttgctgtcgctgtgggtcgagggcccggcgcgcatcgtgcagagcgtcacccatgtgtcgggcatggccgtgttcgccgtggcctacctggcctttgcggcgacagtgttcggctacaccatgtggggccggctgctgacgcgctacccggccagccaggtggcgccgctgacgctgctggtgccggtggtggggctggtgtcggcgcatgtgctgctgggcgaggacctgtccggcgcgcagtgggcgggcgcggcagtggtaatggccgggctgctgctcaatgtgttcggccagcgcctgtgggcgggcagggcgctggcgcgccgctgatcctcccgccgcacttatgctgtgctgcatcagtgggtaaacactatatgcgcattcacgcatatacgaatatattggatgccatggaagagctggatcgcgtattcgaaaaggtatcgggctacttcagcctgttggcggagccgacgcggctgaagatcctgcacgccttgtgcgatggcgagaagccggtcagcacggtggtcgagacggtgggttcgtcgcagaccaatgtgtcgcggcatctcaacgcgatgtaccgctcgggcgtgctgtcgcgccgcaaggaggcgaacctggtgttctacgccattgcggacgaaagcgtgatcgagctgtgccgcacggtctgcgtgcaggtggcgagccggctggaggacagcgccttgccctccggcgtggtcgaccgcttcatggcacagccggcacccgaagccccggcgcgcaggcggcgcaccgcaggctagctcagctcttccggtaaacggatcgctgccgcacccgctgcagcggcccgataacaggcacgccgaccggtccaagggccgtggcgagcgcgccggaggagaccgatttgcaggaacggaaccggcccgggcgcatcgtgcccgcgcccgagcacttcgtcagcgcatcgctgcagcaggacatcggccggcacggcctggacgcgccgcggcgcgacttcctgcgcaagagcttcctgggcgcggccgcggggattgccgccgccacggcgggccgccaggcactggcagccgacggcgatcccgccatcctgcagccgcagccgtgggccacctcgctcggccagccggtggctgcacgcccgtacgggcagccctccgtgcatgagaaaaacctggtgcggcgcgagtcgccgggcctgacgcgcgtctccgccgcttcggtggccttcgcgccgctgcagggcttcttcggcatcatcacccccaacggcctgcatttcgagcgccaccatcagggctggcacgatatcgacccggcccgccaccgcctgatgctcaacggcctggtgcgcacgccgcgcgtctacaccatggacgacctgatgcgcctgccggcggtgtcgcgcatgcatttcatcgaatgcggcgccaacaccggcatggaatggggcaacgtggccgtgcccactgtgcagtacacccacggcatgctgtcgtgctgcgagttcaccggcgtgccgctgcgggtgctgctggacgatgccggcgccgacctgcgccgcggccgctacctgctggccgaaggcggcgatggctcgtcgatgacgcgcaccatcccgatggagctggccgacgagatcatcgtcgcctggggcatgaacggcgagatgctgcgccccgagaacggctatccgctgcggctggtggtgccgggcgtgcagggggtgtcgtgggtcaagtggctgcgccggctggagctgggcgaccagccctggaatgcgaaggacgagaccatccactacgtggacatgatgccggacggcaagctgcgccagtacacctcgatccaggagtgcaagtcggtcatcaccacgccttcgggcgggcagcagatggtgggcaagggcttctacaacatcagcgggctggcgtggtcggggcgcgggcgcatcaggcgtgtcgatgtctcgaccgacggcgggcgcaactggcgcagtgcgcggctggaggcgccggtgctgtccaagtgcctgacgcgcttcaacctggactgggtctgggacggcggccccgccatcctgcaaagccgcgccatcgacgacaccggctatgtgcagccgaagctggggcagctgcgcgcggtgcgcggcacgcgctcgatctaccacaacaacgctatccagagctggcaggtggcggcaggcggcgaggtgtccaatgtccatgtgggctgaactcaggaccgccgccgctctggtgctggcagccgtcagcgccgccccggcgtgggcgggcacggccgacgcgcgtgcggcacttggccgcaccgccacgcccgccgaagtcgccgcgtgggacatcgacgtgcgcccggacttccagggcctgcccaggggcagcggcacggtggcgcaggggcagaaggtctgggacggcaagtgcgcgttgtgccacggcgacttcggcgaatccaacgaggtgttcacgccgctggtcggcggcaccaccgccgaagacatcaggcgcggccgcgtggccggcatgaccggcaaccagccgtaccgcaccacgctgatgaaggtcagcaccgtcagcacgctgtgggactacattcaccgcgccatgccgtggaacgcgcccaagagcctgagcgtgggcgacgtctacgcggtcaccgcctatatgctgcacttgggcgaggtcgtcccggccgacttcacgctgtccgacgccaatatcgccgagatccagcggcgcatgcccaaccgcgacggcatgaccaccggccacggcctgtggccggggcgcggccgcccggacacgcgcaatacggcctgcatgaaggattgcgccggcaaggtggcgattacctcgtcgataccggactatgcccgcgatgcccatggcgaactggcgcagcagcagcggagcttcggcccggtgcgcggcgtggccgcgggcaataccgtatctaaaagtgctgcatcagctccttcggagccggccgcgccgggcgcgcggctcaccagccagtaccagtgcatggcctgccatgcgatggaccgcaagctggttgggccgtcctttgccgacatcgccggcaagtacaagggccaggacgcgcatggcgcgctggcgcgcaaggtcaaggcaggcgggcagggcgcatggggcagcgtgccgatgccggcgcagccgcagatcccggattccgacgtgcaggccatggtgggctggattcttgaggcaaaatagcggactggccaccgcagtgcccccgggcggcggccagtgtgtgccgcgaagccattgcagtacggcccagcggcctttgccgtccccacggctttacagagcttggagagcttaacaatgaagcagtttgtcatcgcagcgctgatgctcggcgccgccgcatcggcccacgcggtcgatgccgccaaggcacaggagatcgccaacaagaacgcctgcatgggttgccaccaggtcgacaagaagctggtcggaccttcctacaaggaagtggccgccaagtacaagggcgacaagaacgccctggcgacgctgaccaagaaggtcaagagcggtggctcgggcgtctggggcccggtgccgatgcccgcgaatgcggcgctcaacgacgccgacctgaagaccgtggtcgagtgggtgctggctggcgcccccgccaagtaagccttaccgaccaggcgggcagtccgccgatgcaccaggccgggcggtgaatgccgcgcggccaggacagaccagcggccggccatgtaccggccgcatgaagcagatccccgaagcggtcatcgaccgactggaacggagtagccggagagcagaaacatgaattccaaacgacgagaagtgctgcgggtcaccgctgtcctgtcgctgatggccgccaccggcctgatcagcgaggcgcaggcggccgagtggaacaagaacgccttcgacggcaagagcgttgctgacgtgatcaaggcgctcggcggcagcggcaccgagaaaagcaccgccatcaccttcaccgcccccgatatcgccgagaacggcgccgtggtgccggtggccgtgaccagcaccatcccggataccgagcagatcgcgatcctggtggaaaagaaccccaacacgctggccgccgacttcatcatcccggccggcaccgagccgttcgtctccacgcgcgtgaagatgggccagacctcggtcgtgcatgccgcggtcaaggccggcggcaagtggtacgtggcatcgaaggaaatcaaggtcacgctgggcggctgcggcggctgacgccgcgccccggatcgagattcccaaactgcaacaggagaaacacatggcagacccgatgcgcgtacgcgccaccgaaaacggcggcgtggttgacgtcaagattctgatgaagcacgacatggaaaccggccagcgcaaggacgcatccggcaaggccgtgccggcctggcatatccagaccgtgaccgcccagtgcaagggcaaggaagtgttccgcgcccagttcggcccggcggtgtcgaaggacccgttcctgaacttcaagttcaagggcggcgccaagggcgacaaggtcgcagtgacctggatcgacaacaagggcgacaagcgcaccgacgaagcgaccatcgcctgacagccgttccgcggccggcaggccatgccgtcctctgctaaggttcgggacggatgccgggactggcccggcgggaaggaacaacatgcggcgagcatttattcgagcatcggcggcactggccgccatcggcctgtcggcaaaagccgcggcccaggccgcgccggctgcgggcaagggcgggcgcatcaaggtggtgtaccagctgtcggaaggcatcgaccaggcggtgcgcgcgatgggcaacctgcgcaaccacctgaacggcgcgccgggaacgaagatcgtggtggtggcgttcggctacggcatcgatttcctggtcgaaggcgccaaggatgcgcgcggcaacacctttgacggcccggtgggcgcgctggcctcggccggggtggagttccgcgtgtgccgcaacacgctgaccgcacgcaagattgcggaatcgagcctgttgatggaagccaaagtggtaccggccggcgtggtcgagattgcgcgcctgcaggccgaagaaggctacgcctatatcaagccctgagccgggcggcgtagcttccggcaacaagagagagaacggcccgccacggtgcgaggccgcgaggagaagccccatgaacaccatccgaagcctggcccggcgcgccgcgctggccgcggcggccaccgctgcggtggcctcagctgccgccgtgcatgcgcagggcagcaccgccgacgaaatcgccaagtaccgccagatgctggccgaaggcaatcccgccgaattgtgggaagccgcaggcgaagaactgtggaagaagccggccggcccgaagaacgcctcgctggaacaatgcgacctgggcaagggcccgggcgtgaccaagggcgcctacgccgagctgccgcgctacttcaaggacgccggcaaggtgatggacctggagcagcggctcgcctactgccgcatgacgctgcaggggctgaccagggaagaggcaacgaagaacccgttctcgtcgtcgggcaagccgtccgagatcgagcgcctggtggcctacctgaccggcgagtcgcgcggcgtgaagatgaacgtgcagctcggccatcccgaagaaaagcgcacctatgcgctgggcgagaagatgttcttctaccgcggcggcgcctatgactttgcctgcgccacctgccatgcggtggacggccagcgcatccgcctgcaggacctgcccaacctgctgaccgacaagggcgcgcaggcggcctacaccacctggcccgcctaccgcgtctcgcagggcgaggtccgcaccatgcagcaccgcctgtacgactgcctgcgccagcagcgctttcccgaacccgcctatggctcggacgtgatcaccgcgctgaccatgttcctggcgaagaacgccaacggcgggacctacgacggtccggcgatgaagcgctgaccagtacgggagagacaacatgcaacgacaacaccaggcactggccatcgcggccctggccaccctgctggcaagcggcgcccacgcgcaggacagcgccaaggcccgcgcgcccaagggcaagcccgccgccgtcagcggtgccgatatgaagcacctgatcgaggactcgttctcgtcgcgcgggccggtcacggtcgagggcgtgctcaaccaggacggcatgcagctggcctgcagccagtacccggaccgcaccaaggtgccggcaaagcttgccaagaagatcgaagcggccgagctcaagcaggtgaaataccccgccgaagacaaatggctgggcgactggaaggaaggcgaaaaggtcgcccagaacggccgcggcatgcagttcaccgaccaggtcggcggcaccaacggcggcaattgctacgcctgccaccagatgaccaaggccgagatctcgttcggcaatatcggcccgtcgctgtaccagtacggcaagctgcgcggcaactcgcaggaagtcatcaagtacacctggggcaagatctgggactccagcgcctacgccgcctgctccaacatgccgcgctttggccacaagggcatcctgaccgaggcccagatccgcgacgtgatggcgctgctgctcgacccggcctcgccggtcaaccagtaaggccgatgcgcgcgcctgccgtgctgctgcgctggctgctggccttcagcctgaccggcgccgcagctggcgcggcagcgctggaggtcggcgacaccgtgcgcctgcccgacgtgcgcacgctcgacggacgcacgctcagcgctggcgcgctggccggcaagccgctggtggtcgaatactgggcctcgtggtgcccgttctgcgcgatgcagaacccgcgcctgcagaagctttacgaacgcacgcgcggcacgccgctgcaggtgctgaccatcagcatcgacaaggatccgcgcgaggctgccgactacatgaagaagcgcggctacaccttcccggcgacgatggattcgcccgagctgcaggccgtgttcggcaagcgcaagggactgccggagctgtacgtgatcgacgcgcgcggccgcgtggcgcagaaggaagtgggcgaaatgcttgaagacgacgtggcggcgctggagcggtacgcgcggccatagttttgcgatggcggacgcccgcgccagggccgaccgccagcgccaattccaggaagagacatgaaccgacgcgagttcctgcaggtgctggccattgccggcgccggcggcatgacgttcccccatcaagacgcgcacgccgcgcaggccgccgaggccatgtacgacctgccgcgcttcggcaacgtccacctgctgcatttcaccgactgccatgcgcagctgcggccggtgtatttccgcgagcccaacgtcaacctgggcatcggcgactatgccggcaagccgccgcacctggtcggcgacgcgctgctgcgccagtacggcatccgccccggcacgccgcaggcgcatgcgttcacctacctggatttcaacgaggccgcgcgccgctatggcaaggtcggcgggtttgcgcacctggccacgctggtgaaacggctgaaggcggaccggccgggcgccttgctgctcgatggcggtgatacctggcagggctcggccaccgcgctatggaccaagggccaggacatggtcgacgccgcgctggcgctgggcgtggacgtgatgacgccgcactgggagatgaccctgggcgcggaccgcgtcaaggagatcgtcgacaaggacttcaagggcaaggtcgccttcctggcgcagaacatcaagaccaacgatttcggcgatccggtgttcgatccgtacgtgatccgcgagatcaacggcgtgccggtggccatcatcggccaggcgttcccgtacacgcccatcgccaacccgcgctacttcgtgccggactggaccttcggcatccaggaagagaacctgcagcaggtcatcgacgcagcgcgcggcaagggcgcgcaggcggtggtgctgctgtcccacaacggcatggatgtggacttgaagctggcctcgcgcgtgcgcgggctcgatgccatcctgggcggccatacccatgacggcatgcccgcgccggtgccggtgaagaatgccggcggcaccacgctggtgaccaatgccggctccaacggcaagttcctcggcgtgctggactttgatgtgaagggcggcaaggtcgcggactttcgctaccggctgctgccggtgttcgccaactacctgccggccgatcccgccatggacgcgctgatcaggaaggtacgcgcgccctatgagcaaaaactgggcgaagtgctggccgtcaaccgcggcctgctgtaccgccgcggcaatttcaatggcaccttcgaccagctgatcctggacggcctgatgcaggcccagggcgcgcagatcgcgttctcgccgggcttccgctggggcaccacgctgctgccgggcgaggccatcaccatggaacacctgatggaccagaccgccatcacctacccgtacaccacggtgacgcagatgagcggcgagaccatcaagaccatcctggaagacgtggccgacaacctgttcaaccccgacccgtactaccagcagggcggcgacatggtgcgcgtgggcgggctgcagtacaccatcgatccgaccgccggcatgggcaagcgcatcagcgacatgcgcctggccggcaagccgctggaagccggcaagacctacaaggtggcgggctgggccccggtggccgaagaggcgcgccaggccggcggcgcgccgatctgggacgtgatggcgcagtggctgcgcagcaccagggaagtcagcgcccgcccgctgaacctgccgcgcgtgcgcggcatggacggcaatccgggcatggccgcctgatgttgtgcggccccgtcacgcgccgcgcagaggattgaagggcgctgcggtattacgctacaatcaaccgccacgggccgatagctcagctgggagagcgctgcgttcgcaatgcagaggtcgggagttcgatcctccttcggtccaccagatatcccgcgcaaaagccccggaaagccaacgctttccggggcttttgtgtttctgccgcctgcgctgtccgtcatctcgcgctggcagccgccatacgctatcgttgactcctcggcacaggcgtacgcgcctttgccgccgccaacctacgcccgccggggccttgttcgatcccatgcaagccaacaggaaatcgagccacccgctggcgatgtccctgcgctggcaatcctgaatctcaagagacatccatgagccacatcctgctgatcaacccgaatacgtcgagtgccaccacgcagatgatggtcgagatcgcgcgcgcctggttcgcgcaggccatggccgcgccgccggccgtggtcggcgcgacggtctcgcgcggggcgccgatgatcatcgatgaagacgaccttgccgtcgccgccgaggctatgtgtgatgcagacatgctgcgcctggccggcggtgccgacggcgtgatcgtcggcgccttcggcgaccccggcatcgaggccctgcgcgcgcagctgtcagtgccggtggtgggtatcggcgaagcctcgatgcacgcggccgcggccgggcggcggcgcttcggcatcgccaccaccacgccgcggctggcggcgtcgatcagcgccagcgtgcgccggcaggggttggacgagctgttcacgggcacgcgcttcaccgagggcgatccgcgcgcgctgggcggtgcgccgcagcagcaggaagacctgctggcgggcgcagtcgatacctgcatccgagccgacggcgcgcaagccgtgatcatcggcggcggcccgctgggcgaggccgcccgagcgctgggccagcgctttccgattcccgtcatcggcccggtgccggcggcgtgcgcggccatgtcgcgggcgctgcgctattgcccggcggcgtaagccggcccatggggacaacaaggagctgggtcgcgccagcgtgcaggcgcgggtaggctaggccacccgggtcggccggcgggccttcatcgccgagggccgtacctgttgcagcgcgcgcagcgactgcagcgcgtcctcgaccgcctcgatgccgtcgcgcaggcggccgatggcatagccaaggcggctttgcgcatcggcgtcaggggtggaaaggttctctaatgcatcgacttccgcctgcatctgtccgaccaggcggcgcagctgggatgtgctgtgcgaggcaagtgaccgaatcgccatcgttgggtcctccttgcagtgtccgggtgttcccgtcctgtgtaacggtaaaggcgacaccagaacttcgccagcgctgttacgaaatcagcacggcagcgccgccgtggcccggtccgcctatcgcggatgttgggctatagtcacccgatggaatcggaacacaaccctctgcggccggcatccgccggccttccggacgacgccaccgccgccagcccggccgaggccgacgcgcgccaccgggctggccggcgcagcacgctggtcagcgtggccgtcaatatcggcctgaccgccgcgcaggcggtggccggtgtcatctctggctcgcaggcgctgatcgccgacgccgcgcattccctctcggacctgctgtccgacttcgtggtgctgctggccgcctggcagagccgcaaggatccggacgcccaccaccagtacggccacctgcgcttcgagaccgcagcgtcgctggcactcggcgtgctgctgctggcggtgggggcaggcatgctgtgggcggcggtggacaaattgcagcacccggccagcctgcagccggtgcagccagtggccttgtgggtggcgctggtcgcgctggtgtccaaggaactgctgttccgctacatgctcgcggtggcgcggcgcgtgcgctcgggcatgctggtggccaatgcctggcatgcgcgctcggatgcggcctcgtcgctggtggtggcgctgggtattggcggcaacctgctgggctaccacatgctcgacccggtggcggccatcgtggtcgggctgatggtggcgcgcatgggcctgcgtttcggctgggatgcgcttaacgacctgatggaccgcgcggccgacgaggaaaccgtcgcggcgatccgcgcgaccatgctgggcacgcccggcgtgctgggcctgcacgacctgcgcacccgcaagatgggcgaccaggtgctggttgacgtgcacctggagatcgatgccgcgctgacggtggcgcaggggcatgcgatcgcggtcgaagcccggcgccgcaccctggagaaccatcacgtgctcaacgtgatgacgcacgtcgatcccgtatacatgggcagccaggccagcgctgcctgagcccggcctgtggacatctttgccggttgctggggataaccggccggacaagctgtggcccgcctgggggcgccttgtgggacgtatacggataactcagacgcccgcactgccgacgtatacgtgactgccgcgctatcccggcgaatcagggttatcccgcagtggttatctttgctgcaagtccctgagccaaaaggggaaaggtgacttatccacggcctgatgcctggtttacctactactactatgtttacatacgtaaacaatattaaagacatagacaggaccgttgcgctgttcgcattggcctgacgtttacgcgggccatggcgctggtacgccggcgtatacctggcgcgccgggtatacgtccacgcaacgctagcgcggcaccttgaacaccttgcgtgcagccagtacctcggcacgggtcgtgcagccttcctggtggtcattgaccagccccatcgcctgcatcagcgcgtacatggtggtgggaccgacaaagcgccagccgcgcttcttcaggtcctttgacagcgccgtggattccggcgaggtcgccatggttcgcagcacctcgggtgtcagcactttgggccggctggccggatcgggctcgaagcgccagaagtaggcggccagcgatgattccgtctccagcagttcgcgggcccgctgcgcattgttgatggccgcctcgattttgccgcggtggcgcacgatgccggcgtcgccgagcaggcgcgcaatatcgcgctcgccgaagcgcgccaccttttcgatgtcgaaattggcaaatgccttgcggaaggcctcgcgcttgcgcaggatggtcagccagctcaggccggactggaagccttccaggcacagcttctcgaacagccggcggtcgtcggcgaccggaaagccccactcggtgtcgtggtagtggcaatagtcctccagcgtgccgcaccagccgcagcgcaccgctgcttccttcttgcttgtcatgggtacatgttccctgttgaaagtcccgcacgccggccaggctctcgccgaccggcgcatttgctgcgatcatgcccgcacctgagagattgcggaaggctgaaaatggacatgcgattgacaaccctggacgaagacggatgggagctcgacgacgccgagcccatcgccgccgcccatcccgagaccttctggatgccgccgcgcgaggagcgtgatgcactcgcacccggccagctggtcaagctgatcttccgcatcctagtcgcggacgagacgggcagcgaagaggttcacgtggagcggatgtgggtgatcgttaccgggcgcgagggcagcctttataccggcgagctcgataaccagccgtattgcaccgaggagatgaacccgggcatgccgctgtgcttcgaggctcggcatgtgatcaatatccaccgggacgagcacgaggcgagctaggttgggttgtccgcgcgcactgtttggttcggcgccaacccaataaggccaggccaggctcagaagctgaccgccagccccagcgagacgcccgacacgttgttgccgaacacatagcgcaacactgcccggatccgcgtgacaaagacctcgtgcgcgctggtgtccagttccagcccggtgccgagcgtggtcaggtagttgaagccgaggatgccggcctggctgccaagatagtgcgaatgtgatagctcaagcacgtatcgtaccggccggtcgaacgcatgcatcccggtcggggcccgccagcgcgcccacaggttggcggtctgcgccgtggccgtgcccgtgaccgcgctggacgtgccgccgaagctctgcaggtggatattggtgtagcgcagttccacgtcgatctcgtagttctcgcggtagtgctcccagtccagcatcaccgacccgcccagcccgtaggcattcaggctgccgccgtcgaggaagttgagctggcggtcggtgacctgctcgaccgcgaacttgccgattgacaggtcgctggagacattgccgagcgaggcgttgaagatcggccggaacaccagttccttgttggccgtcagcggaaagtcccagcccacgccgatggtgccggagaaggtgttccagcgggtcgggatggcgcgggattcggcgccattggtggcaatgaaggtgggatcgtagcggctgtaggcgacggcgccttccaggtagagcgggaacgacttgctgatggtgaagccgccgcccagctgcgacatgacgatgccgggatcgtcggtgctggtgttgttgatcgacagcgagctggaggtaaggtccggcaccaccgagtacgccatcagcgacagcaccgcgttggcgtgccgctgcacattggccccggccaggcgcagtccgggcgcgctctgggcatgtgccgcgccggcggccagcagcgccgccgcgcccatggcggccagggccgcccgccaaaggggccgcgagcggcggctaggcgcggggtggaaccggcggtgtcgctggcgtgcggacatggacaatctctgtgcagtcagtgccgctgcgcgctgccgtgcggcaatctcccgcgcattctagcggcgcaggattgtgagggagcgtcgcgcgaaatctttcagatcggactgctgccgccttaaatcggcgcggcgccggtcatgcggccggatggcgccgggtcgacggtccggagggcggggagggcggcgtagccggcatggccggatgggtgggcgccggccggcggcgcgtgagccacagcagcagcgcactggcggcccagccggtcacgaacacggtgtcgccggcatggttcagccaggttgccgcagcgggcgtgccggccagcgatgccagcaagccggccggcaggcgcgccaggatccacagggcgacggcgggcacgctgccgtagacgcccggttgccaccagtgggccaggaagggagggtgccgcccggggcggcgcgggatgcgcggtaccaccgaagtctccggccacgcatggcgcgcggggcgtgccggtggcatcaaggcgttgcaggagccccgcccgacgacaccgccgggggctcacggttgcatcataggccgatcgcccctggctgcgttgccggtgaccgaggcgctgtgtgcgccacgccacgctgggcccggccgttcaacttttttgcacgacgtgtccgcaaatggcgcccgtgcccagcgcggatctttgccaaactggatgcaggtacacaaacagtttgaaggtggtcctgccatgcttccctcgctctacatctcccacggttccccgatgctcgccatcgatcccggccccaccggcgccgcctttgatgcgctgggcgggcaactgcgcacccggcgcccgcgcgcggtgctggtgatctcggcgcactggatctacagcacgctggctgtctccagccgcgagcgccaggaagcctggcacgatttcggcggcttcccgcgcgaactgtacgcactgcgctacgacgccccgggttcgccggcgctggccgggcgggtcaaggccctggtcgaggcggcagcggtccccggtgccgggtttgtcggccaggacgacgaacgcccgctggaccacggcgcctggatgccgatgcgccacttcttcccggatgccgacgtgccggtggtgcagctggcgctgaacccctacctgtcgcccgcaacgcagatcgagatcggccgcgcgctggccccgctgcgcgacgagggcgtgctggtgctggcctccggcagcttcacgcacaacctgcaggaagtgtttggcggcggccggcgcgaccagcatgggccgcaggccgagccgtatgtggaagccttccgcgactggatggcggaagccctcgacgaggccctggccagcggcgataccagccgcattgccgactaccgcgcccaggcgccgtatgcgcgccgcgcgcacccgaccgacgagcacctgctgccgctcttcgtggcgctgggcgcggccttggggccgcaggctgccagtggcgcagggccggcgccggccagcgtatcgcgggttgccgatgaggtgacctatggcgtgctcgccatggacagcttcgtgttcgagggcctgggcgccggcgcgccgctgcgcgcggcggcctgacgcgccttaccgttcggccggggcgcgcgccggcaggtagcgccgtgccgagcgcgcgcccgcaagcgcgatccagcccatggtcagcgccaccagcgccagcccgatgcgcaggttggacaggtgcgcgaccccgccgatcagcaccggccccagcagcagccccaggtaggcaaagcgcgccacgcgcgaaattgcttcggccggcgccacgcccggcagccgcgacgcggcaacgaagaagatcggcaccatattggccgcgcccagccccatcagcgtaaagcccgccagcgcggctagcggcagcggcaccagcagcgccagcgcaatgccgccaaagcccagccaggcactgccagtcagcgtggcgccgtcgcccaggcgcgcgcgcaggcggtcgccgccgaagcgtccgcacgccatcccgcccgagaacgcagcgtagcccaggccgatccagccatcgggcgcctgcgccacgtcgcgcatatagacgctggtccagtcgtacatcgcgccttcgccgaccaggcccaggaacgccagcaggcccagcagccacagcgcgcgcaccgcgtggtcgcggtggtgggccgccgatggcagcaccggatggtccgacagcagcccgggcagcgtacccagcgccaccgccgcggtcacgcctgccatcatcgccgcatgtgccagcggcgccacgtccagcgacagcatcaggccgcccgcgcccgcaccggccatgccgcccaggctgaacatgccgtgcagcgccgacatcaccggccgcgtgcggctggactcgaccgtggcggcctgtgcgttcatggcgacatcgaaggccgcattggccatgccgaacgccaccagcgcgggcagcagcagccagaacgacggcatcgccaggatcgccaccgtggccagcgcaaacagcagcccgcccgtcatcgacgcccgtgcgctgcccgcgcgcgccacccagcgcccgaccgggcccatcgccaggatggcgccgccggccacggccagcatcgccagcgacagcatcgcgtcggacaggccgaagcgtgccttgatggtgggaatatgcacgccccacgtggcaaaggtggcgccattgacgaagaacagcgccatggtgccgcgcgtggcgcgcgacaccgcggccggcaagggcgcggaagccgtcggggagtgcggatcaggcatgggagggtgcggcaggcggggcagcggtgcccctgcaaaagccgtcattgtcccgcatcggcgtgaggcgggtatgacaacgccgtgctaccggccggcgccatccacgcgcagcagtccgcgccggtgcagcgcgtagccgaaggccagcagcgcgcccagcgccagcgccaccatcacccacagcatcagccagtagccgccggcggcacgccacagcagcgcgcccagccacggcgcggcggcctgcatcagcaacaccggcgtcatcatcaggccgttgagcgtggcgtagtgatggcgcgagatcagttccggcatggccatcgcgcgcagcatggtgttgacgccgttggcgcagccgtacagcaccgcggccaccatcagccaggcgccgtgccccagcgcaaagcacagcagcccggcgcccatcagcgcatagaccggcagcgacagccgcaccgggtggcgcacccccgcgcgcatcatcagcatgcggcccgctacctgggccgggccgatcagcgccgccactaccagttgctgcgccactggcatgcccttctccgtcagcatcgggatcaggtgcgcgcccagcagcgaggccaccaccgcggtcgcggtaaaggccagcaccaccgcccagaacaccggctggcgcagcgtggcgcgggcaatgtcgcggctgccggcctggccgtcggcgggggtcatgccggaataggtgggatgcagcgcgtagcgcatgcgcgcgtgcagcggcgcgcagaccagcaggttgagcgcggcgaagccgatcagcgtcgggcgccagcccagatggatcaccagccattgcgccagcggcacgaagatcgtgctggcaaagccggccatcagcgtgaccaccacgatcggcttctggtactggtcgccataggcctggcgcagcaccacgaaggcgggctcgtacagcgtggtcgccatggccagcccgatcggcacccacatcagcaggaacaccggctgcgacggcgtccatgcccacagcagcaggcccagcccggccagcaccgagcccgcgcccatcaccttgcgcgccggcgcgcggtccagcagccgccccaccgcgaacgagcacagcgcccataccagcagccccagcgaatagccgcccgccaggaagggcttggaccagcccaggctgcggatcatgggatcgatgaaaacggtgaaggcgaagaacagcgtgccccaggagatggtctcggtcaggccgaggatccagaccagccggcgcggcggcgtagcggggtgcgcgggtccggtgcgtgccgggctggcgtctgagtcggtgctggcggcgtccgcgtcggagctggcttctattgttgtcatggcgggcccggcgggggtagtcgccatagacggcggcgcgttgggccagtcggaaattgtagcgatcccgcgcgcactgcgcgcacggggcacgcgcgttactgtgcggtcaccggcgcgggcggtcccttgagctcgaccacgttgccgtccggatcgctcacatagagcgacggtcccttgccttcggcgccgaagcgctgcgccacctcgccggcgtccacgccatgccgcgccaggtgcgcccgcaccgcgtcggcatcgaacgggtcgatgcgcaggcagaaatggtccaggttgcggccctgcgctcccggtccggcgccgccggcgcggccgagcgggccgtcgagcgcgaccaggtcgatcagcccgctgcccgcgcgcagctgcgtcaggcccagctcggtttgctcgcgctcaacgctgcagccgagcacctcgacatagaagcgccgcagcgcgtccacgtcggcgctgcgcaacaccaggtggtcgatgcccaggatgcggaacatggcggcctcagtggtgcagtccgtcgtagtcgatgaccttcaggctgtccaggtcgacattgtccaggcagcgcacattgactgcggccatcggcttgccgtccttgtcctgcccgtccgcatacggaccgcagccgcacaccgggcagaagcggtgcgcgatcttcatggtgttgaagcggtaggtggaggcattgctctccggcgtttccagcttgaacgtcgcgcgcggcacgaaccacagcaggtggccgcgccggcggcagatcgagcagttgcagcggatcacgctggggatgccgtcggcctccacttcgaaggcaatggcgccgcagtggcagcttccgtggaaagtcatgtcgtctccttgaggtcggtccggcgtgcccactaaatatctggaatcagtcgtttgcccaggctgaccacttcatcgggcgcatagcccagcttgtcgtagaaatcgatcacggcgcggttgcctgcgcgtaccagcaagttgatcttggggcagccccgctcgatcagcaactgctcggcatgcgccatcagcatgcgcccgtaccctttggcctgcaggtcgggctgtaccgccagatagtagatccagccgcgatgcccgtcgaaccccaccatggcagtggcgacgggtcggccgtcgatgtcgccgaccagaaacagttcaggctgctcggtcagcttgcgcgcgatatcgcgctgcgggtcgttccacggacgggtcaggccgcaggcctgccacaaggcaatgacgcaggattggtcttccgggcggaaaggacggatcagcatgcttgttggtgcgccgcaatatgccggcacattgttagctttttgacagtgtagcgccgctgcgggtgccacaatgcctgcaagacatgacgagacgacgcgcggccatcgcgcacgctgccaccaaaggagacccgcatgagcgacacccacgcgcctgcacgcgccaccttcagccatatggaacacggaacccgcgaggactgggccgccatctccgccgagttcatgccgttcgcgcgggcgctgccggatcgcgtgctggcgcacctgcgcctgctggatggcgattgcggcggcttccccgtggaccggctcacgcattcgctgcagaccgcgacactggcgcaccgcgacggccaggacgaggaatacgtggtttgcgcgctgctgcacgatatcggcgatacgctcggcagcttcaatcatcccgacattgccgccgccatcctcaagccattcgtcagccccgagaacctgtggatggtggaaaagcacggcgtgttccagggctactacttcttccatcacctcggcctggatcgcaacctgcgcgagcagtaccgcagccagcccgaactgttcgagcgcaccgcggagttctgccgcaagtacgacggtgccgccttcatgacggactacgacacgctgccgctgtcgttcttcgagccgatggtgcggcgcgtgctggcgcagccgcgcaactcgatgtatgtgaagccgggagaagcgacgctggcacagccctgaaagcacaacggcctcgcttcatgcgaagcgaggccgttgtgtcatgccatggccagtcaggccgcgcgctgcgccgtctccggatggcggaactgctccagcagcttcgcccagcgcccgcgtaccgccttcaggttgttttccttcacatgcccgaagccgcggatatcgtccggcaggttcgccagtgtgaccgcggtgtcgtagttggccgcattcaggcccgccaccagctcatccagcagcgcgcggtactcgccgatcagcgcgcgctcggtgcggcgctcatcggtcttgccgaagatatcgaacatgccgccgcgcaggcccttcatcttcgccagcaagcggaacagcttcatcgtcgacggcccgaacttgcgcttgaccaggtggcccttgtcgtcgcgcttggcgttaatcggcggcgccagccagaagttgagctggtagtcgcggcccggctcgccttcaaactgggcgcgcagcttgtccaagaagacagggtcggtgtagagccgcgccacctcatactcgtccttgtacgccatcagcttggccaggttgcgcgccgcggcctcggtcagcggcagggccttgccgctgccagccagcgtgctctcggccacgcgcacgcggtcgatggcttcgcgataggtgcgcgcgtacgcggcatcctggtaggccgtcaggtgttccatgcgccggccgatcagcttctccagcatcgcgccgctcgaggtcggcagcttgaccacttccgcgccttcggcggtgttcttcagcttgccggtcagcgacagcacgtgctcggggtcgtgcgccatatgccggccccagtcgaacgcggccttgttcttctcgacagcgacgccgttgagttcgatggcgcgctccagcgcctgcagcgtcagcgggatccagcccttctgccaggcatagccgagcaccagcgggttggtgtagatcgcgtcgcccagcagcgccacggcgagacccgaggcgttgatgaactcgcacttctcgcccaccgcggtgcgcacatcctgctcggccgacaggccggggaactgccacttcgggtttttgatgaagtcggcggtcggcgtctgcgcggtgttgaccacggcgcgggtgcggccggcctgggtcttggagatgacttcgtcggtggccgacacgatcgcatcgcagccgatcaccaggtccgcctcgcccattgcgatgcgcgtggcatgcaggtcgtccgggcgcgcggccagctgcacgtgcgacagcaccgcgccgcctttctgcgccaggcccgccatgtcgagcacggtgacgcccttgttctccaggtgcgcggccatgccgagcaggccgccgatggtcaccacgccggtgccgcccacgccggtcaccaggatgccgtaggcgcggcggatcggcggcagctcaggctctgacagcgcgggcagggtgttcatcgacacgccgtgctgctcgggcttgcgcacctgcgcgccttcggccgtgacaaagctcggacagaagccgttcacgcacgagaagtccttgttgcacgacgactggttgatctggcgcttggtgccgaaatccgtttccagcggttccaccgacaggcagttggacttgaccgagcagtcgccgcagccttcgcacaccgcgtcgttgataaaggcgcggcgttgcggatcctccatcgtgccgcgcttgcggcggcggcgcttctcggtggcgcaggtctggtcgtagatcaggatggagcagcccggcacctcacgcagctcacgctgcacgctgtcgagctgatcgcggtgatggatggcgatgccttcgggcagcttgatcgcgccgttgtacttctccggctggtcgctgacgatgacgatcttcttcgcgccttcgctatgcacctgccaggcgatgtcccgcaccgacaactggccgtccaccggctggccgccggtcatcgccaccgcatcgttgtacaggatcttgtaggtgatgttgacgttggccgcgatcgacgcgcggatcgccaatagaccggagtggaagtaggtgccgtcgcccaggttggcgaacacatgcttgtcgccagcgaacggcgcctggccgatccacgccacgccttcgccgcccatctggctgaaggtgctggtattgcggtccatccacaccgtcatgtagtggcagccgatgccagccagcgcgcgcgagccttcgggcacattggtcgaggtgttgtgcgggcagcccgagcagaaccacggcttgcgctccgccgtcacgcgcggcgtggccagcgccttttccttggcctcgatgatggccaggcgcgcggtgatgcgcgcgcgcacgtcgatcggcagctcgaatttgtccagccgggtggcgatggccttggcgatgatcgccggcgacagctcatagtgcgccggcagcagccagttgctttgcgggatcgaccattcgccgcccgcgttgtccttttcgtcgaacttgccgtagaccttggggcgcacgtcgtcgcgccagttgtacagctcttcctttagcgcgtactccatgatctggcgcttctcttcgaccaccaggatttcctgcaggccttcggcaaaggcgcgcgccccatgcgcctccagcggccacacgcagccgaccttgtacaggcggatgccgatctgcgagcaggtggcatcgtccaggcccaggtcggccagcgcctggcgcgtgtccaggtaagccttgccgccggtcatgatgccgaagcgcgcgtgcggcgaatcgatttcgatgcggtcgatcttgttggcccgcacataggccaggcccgcgtaccacttgtagtcgagcaggcgcgcttcctgttccagcggcgggtccggccagcggatgttcaggccgcccggcggcatgatgaagtcgtccggcagcacgatctgcacgcggtgcggatccagctccaccgaggccgacgattccaccacgtcggtcacgcacttcatcgccacccacaggccggagtagcggctcatggcccagccgtgcaggccgtagtccaggtattcctgcacgttcgacgggtacagcaccggcaggccacaggccttgaagatgtgctcggactggtgcgccagcgtcgaggacttggccgagtggtcgtcaccggccagcaccagcacgccgccgtgcttcgacgatcccgccgagttcgcgtgcttgaacacgtcaccggtgcggtccacgcccggccccttgccgtaccacatgccgaacacgccatcgaacttggcgtccggatacatgttcacctgctgcgacccccataccgaagtcgcggccaggtcctcgttgaggccagcctggaacacgatattgtgcgcggcaaggtgcttcttggccttccacagcgacaggtcgagcgcgcccagcggcgagccccggtagccggagataaagccggcggtgttcagcccggcggcgcggtcgcgctcctgctgcagcatcggcaggcgtaccagggcctgcgtgccgctgatatagatgcggccacgctccagcgtgtatttgtcttcgagggaaacgttttcgagcgcgcggcggatggcgtcgctgaccggggaggtcaggggggcattcataggtgctcctctatgggcgtgctgtcgggatcaccgacacctacagttgtgggcgaccgcctcatgacctcttgtgaaggtgttggacggtcgtgtctctgcgcggcatggtagcaccgccacaaaatcggcggtaccttgcaatgcagcacaaagcgtgcccgccgtgcccgtgatttcccgtatggacaggggttcgcgtgtacactgcgttgcatcgagatggcccgtgccgctgccgggctgcctgcgatgcgccacatctgcacagccagcctggtgcaacctgatttccgattgccgtcctgatgcacgcatgggacgggcaaaccagtgactacctgaacatgaccaattccccccgccagggcaccgcgaccctggccgtgctgatcgatgccgacaacgcggcgcccgccatcgtcgaaggcctgctggccgaggtcgccaagtatggcgtggccgccgtcaagcgcatctacggcgactggacccggcccaacctggccggatggaaggagcggctgttgtcgcactcgatccagccgatccagcagttccgctacaccgtgggcaagaacgctaccgacagcgccatgatcatcgacgccatggacctgctgtacaccgggcgcttcgacggcttctgcatcgtttccagcgacagcgacttcacccggctggcctcgcgcatccgcgagcaggggctgaccgtgtacggctttggcgagcgcaagacccccaagccctttgtcaccgcctgcgacaagttcatctactccgacgtcctgcgcgccgatgcggatacggaagggaccgaaggcgtcgacggggctgccgcgcccacgcgcaagcgcagcaccggcgagctgcgccaggattcgcgcctggtgcgcctgctgcagagtgcggcgcaggcggtgtcggacgaggatggctggctgacgctgggcagcatgggcaaccacatcgccaagcaggcgccggaattcgattcgcgcaactacgggtacggcaagctttcggagctggtgcaggccaccggcctgttcgaggtcgagacccgcaacggcggcaacaacaagaccatctgggtgcgcctgaagaagcgcgccaagggcggtggcgagggcgatggccgcggccagcagcagtcgcaaccgcaacagcagcagcgtccggcgcagcctgaagcacgccgccagccggcaccggcgcccgtgcccgcggatccgcctgcgcccgccgtggcccagccagaggcggcgcctgagcctgtgccagtgcgcgaacccgagatcgagctgtctgtcgtcgccgccgaagtggccgagccggcggcggaggcagcgccgcaggctgagtccaaggcccgccccgcacgcaagcgcgccacgcgccgccccgacgtgacgctgagcgaaaccccgtggccgatcgaccagtcgatctttgccgcgccgggcacgacagtgctgtcggcgcaggttgaagcgcagccagaggcccagccccagccggaggcagccgctgccgaggcggcgcccgcccgggcaccggccaggaagacgcgcaagcgcccggccaagaaagcggagtgatgtggctggccggcgccatgccggccctgcccgccaaagaaaacgccggcttcgcgccggcgttttctttggcagaggtccttaccgcaccagctggttgatctcgatgatcggcatcagcaccgccagcacgatcagcagcaccaccacgcccatggtcaggatcagcagcggctccagcaggctggtcaggaacagcgtgcggcgttccagttcctgcgcctcgccctgcgcggcgcggtccagcatcaccggcagattgccggtggcctcgccggagcggatcaggtgcaccagcactggcgggaactggttctgcgccgccagcgcgcgcgccagcgaggcgccttcgcgcacgcgcgtgttggcgtcttccacgttggcgcgcagcgcctcgttggtcagcgtctcgcccgccgcctgcaggctgcgcaggatcggcacgccggccgacaccaggatcgccagcgtgccggcgaaccgcgcggtgttgtagccgcggatcagcttgcccagcagcggcgcggtcagcagccagcggtgccattccagccgcaccgcgggctgcttcagcacgctgcggattgtgaacgctgccgccgccagcaccgccagcgctgcccaccaccagttccggacgaagtccgacagcgccagcatgatgatggtcagcatcggcagcttctgcttggtattggcgaacacgctcaccacctgcggcaccacgtacgacagcaggaagatcacgatggcgaatgccaccaccgtgacgatggcggggtaggtgaaggccagccggatcttggaggtcagggtgttgcgcgactcgatatagcccgccagccgctccagcaccagtcccaggtggccggagtgctcgccggccgagaccagcgcacggtagatgtcggggaagtcgcgcggatgctgggccagcgccaccgacagcgagctgccgcccatcacctcggcgcggatgccggccagcagctcgtgcacataggcgcgctcggcctggtcggccagtgcccccagcgcctcgtccagcggcagcccggccacgatcaggctggccagctggcgcgtgaacagcgcctgttcctgcgtcgacagcttgcgcgcaaacagctggctgccgctgcgcggcgccaggccggcaccggcgagcgggtcgacggtcagcggtgtcagcccgcgcgcgcgcagctgcgaacgcgcctggcgcgggctgtcggcctcgatcacgccgcggtcggtcttgccggcggcgtcggcggcttcatagcggaaggctggcatccgggcggctccgctttagtcgcgcgtcacgcgcagcacttcctcaagcgaggtcgcgccgctgtcgatccagcgctgcgcgtcgccgcgcatggtgtgcatgccgtgcgccagcgccacctgcttgatctcggactccggcgcctgccggtggatcatggtgcggatctcgtcaccgacggtcagcagctcatagacgcccatgcgcccctggtacccggactggccgcacttgtcgcagcccaccgggtgccacacggtctgcagcggcttgccctgcgcgtgcagcacctcggcctcggcggcagtgacctcgatcacttcctcgcgcttgcagtgctggcacaggcggcgtaccagccgctgcgccagcacgcccagcagcgacgacgacagcaggaacggctcgatccccatgtcgaccagccgcgtcaccgccgaggccgagtcgttggtgtgcagcgtggccagcaccaggtggccggtcagcgaggcctgcaccgcgatctgcgcggtttccaggtcgcggatttcgccgatcatgaccacgtccgggtcctggcgcaggatcgcgcgcagagccttgccgaaggtcatgtcgatgcgcgcgttgacctgggtctggccgatgccgtccaggtcgtactcgatcgggtcttcgaccgtcatgatgttggtggtgcgcgcatccagccgcgacagcgccgcatacagcgtggtggtcttgcccgagccggtcggcccggtcaccagcacgatgccgtgcggctggcggatcaggtggtcgaagccgcgcagcgtgccgggcgccatgcccagcttggccaggtcgagccggcctgcttccttgtccagcaggcgcagcaccgcgcgctcgccatggccggtgggcagggtcgagacccgcacgtcgaccgggcgcccgcccacgcgcagcgtgatgcggccgtcctgcggcaggcgtttctcggcgatgtcgagctgcgccatgatcttgatgcgcgagatcagcgcgccgtgcagcgcctttttcggccgcaccacgtcgcgcagcgtgccgtcgacgcggaagcgcaccaccgacgacgactcgaacggctcgatatggatatccgaggcgccttcgcgcgcggcctgtgtcagcagcgcattgatcatgcggatgatcggcgcgtcgtcctcggattcaagcaggtcctccaccgccgggatgtcctgcatcaggcgcgacaggtcgacttcgccttcgacctcgcccaccacctgcgcggcgctgccggcgtcctggcggttgtaggcatcggccatggcgcgctccagcgcgtcgggctccagcacgcgcaggcgcagcgcgccatgcacgcgcgcgacctcggccagcgcggtcggagaggtggcgcgggtcacccagacttccagtccgtcagggcgctggtgcgcgaccagcagcggcgcctcgcgcgcaaagccgtacgagaccagccgcgccgccatcggcgagggcggctccagggtctcggccggcgcgctggtgccggcgggcagggcagtttggacttcgctggccatgtcggggcttagttctggagcgcagactcgccgcgcgggttcagcggctgggatgcgttcgccggtggttgcggcagctgctgcggtgccggctgcatgggctgtggctggcccggcacgccgggctgcggggcattctgcggaagggtctgctgcagcggcagcggggcggcaagcggaccgtttgcacgcggatcgacgaacggcgtggacggggcgtcggccggcggcagcaacggcgtgttggtatcacgcaccatgatgttaggcgaaacaaagccctgctgctgcgcgcgcatatagtcgtagcggtcctgcgtcaggcggtcggcggcgccggccgtgcgcatcacataggggcgcaggaacaccagcaggttggtcttggcgcggttcttgttctcgtagcggaacaggccgccgatccatgggatgtcgcccagcagcggcaccttctgcacgccgtcgccgtacgagtcctcgatcaggccgcccagcacgatgatctggccgtcgtcgaccagcacattggtctcgatcgagcgcacattggtggtcgggccctggatcaggttggcggttgcctgcaccacgttcgacgactcctggaagatctgcatcttcaccagcccgccgtcggtgatctgcggcttcacccgcagcgtgatgcccacgtccttgcggtcgaaggtctggaacggcgtgaccgaggccgcgccgccggtctgggcataggagccggtggtgatcgggatgttctggccgatcaggatcttggcttcctcgttctccagcgtgatcaggttcggcgtggacagcaggttgacgctgccgttggaacccagcgcgcgcaacagcgcgcccagccccatggccttgttgacgatgcccaggttgaggccgccgatgtcttgcaccagcccctgcgccgcggcgatgccggcggtgcggttgctgtcggccagcgccccggccagggtcaggttcaggatgttctgtccgccggtgccgaagttggtgccggcaaagacgttgttgttgccgcccggcgagctgatcaggccctgccactggatgccaagctcgctggcctgcgtggaggtcacctcgacgatcatcgattcgatgtagacctgcgcgcggcgcgcgtcgaggtcgtcgatgacgccgcgcaggttgcggtagaccggttcgctggcggtgatgatgagcgagttggtggacgggtcggcctggatgatgccgccggtggtcggctgggtgctggtgccgaacgacgcggcgaaggccgagttgccataggcgccgcccgtgcctccggacgcgccggtgccgccgcgcatgccggcctgggtgccggtggcgccgccggtgaactgcccgccggcaggcgtcgagacattggtcatgcccgccgcgccgccgatgccgccggcctgcccgccgggctgggtggcgctggcgaagctgctgtcggcggcgacgatggcgcgcagcgtggccgccagcttgaccgcatcggcgttcttcagcggcactacccagatattgcccgggcgtgcatagggctggtcgagcttctcgatcaggtggcgcgcctgctgcaggcgcgcgcggctggtggcgcggatcatcagcgaattgctgcgcggctccgccaccaccgaggtgcgcaggctggcatcggctcccggtgcgccgccgccggcggcgcccgcggcggcggggtcgagcagcttctgcagcaccgccgcggtatcgctggccagcgcgtgcttgagcggcaccagctcgacctcgcccgaggccggcgcatcgaccgcggcgatgatgcgcgccagccggcgcaggttgtcggcgtagtcggtgatgaccagcgtgttgttggccgggtaggcggtgatggtgttgttgggcgcgatcatcggccgcagcaccggcaccaggttgttggccgattcatagttcagccggaatacctgcgtcaccacctggtcgccgcggctggggctggcgccgatcacggtgggcgagccctgcagcttggcgtcggcctcgggcacgaccttggtgaagccgttgctctcgaccatggcatagccctgcatgcgcagcaccgaacccagcgtctgcagcgcctgcgcgcgcgagaccggctgctcggtgaccaggttgaccgtgcccttcacgcgcgggtcgatcacgaagttcttgccggtggcctggccgaccgccttgatcaccgaatccaggtcggcgttgacgaagttcagcactacctggtcgcggttggacggcgtgatgtcgggtggcgcgggcggggtgccggtgcgcgcgccggactgggcccacagcggcgcgggcgccagcagcgagagcccgcacagcagggccacggcgcgggcgcaggcggtatggaaaacaggtcggatggcgtgggttttcatagtcatttccgggcgctcctggattggcctggcatcagaagcgcagccttgtcacatggttgtctcgtcgtcccagcaggctcagcaggctggtcagttgggttgccgcttcgggctcggcgtgcgcggtgccctcgaagcgcgcctgccgccccagcgtgccgctgccctccaggtgcagcggcccggcgatggtgctcagctgcagcttgccgccgccctcgccggtccagtcgagctcggcgcggtagctgcccagcgggcgcagccggctcacggccgacgacacctgttcgatgcgcagcgtcatatggccgctcatgccctgacccgaaaagcggccctgcagcgtggaccagtccacgcgcatcaggccgtccgggcgcagcgtattgaacggcgcgccgatgccttcgagcagcgccgcgggcagccgcatggcgcctgcctgtgcgctccagccgccgggtgtcacggtgatggcgaccggcgcggccatggcctcggagtggctcaccaccaggcgcgcgctgccgcccagcagcggccagaacgccagcgtccattgcagtcggcccggcagcacggtcgcggtctggctgccggcgccggccgacagcgccagcgtggcgctgccatgccagagcgagccgctggcatcggccagcagtacccgtccctgcgtctgcgtggccacgcgcgcggcgatccatgccgccggcagcatcgccaccacggtcaccgcggcgctcgccaggccaagccccagccagcgcaggcgccgccctgcggccggctggcgcagcttgcggcgcggcaggcgcagcgtttccagccgtaccatcagctgcggccgcccggaccctgcagggtcgcgctgacgttcaccagcgccgtggcgccgacatagacgatacgggcgtcgatcaccttcatgcgctgctgctggcgcacgtcctgcagccagccgctgaccgcgccgaacggcaccttgtccagctgcacctgcacgctgttgtcggcgccggcggccagccgggtcgccttcaggccgtgctggcccaggctgtcctgcagcgcctgcgtgagcgcgtcgccgcgcagcgccggcgccggcgtggccttcaggccgcgggcttcctgcgccagggattccatttcggccaggtcggcgcgcagcttgggcaggttgcgcgccaggcgctcgcggccgtcggcggccggttcccacagcaccaggtagccgatcaccagcgccagcagggcgccgccgccggccaggatggcctgttcgcgcgggttgcgcgccgaccagaaggcgttgaagcgctcctgccacgcctgcggcacggacgggcgcagccgcgccaggcgcgtgcgcagcgcagaggtcgcgcctggccggctggtgcgtggcgtctggcttcgggctgtgtctttcatcggattcatgcttgctggtgggcccgcttacaggccgggcctgacggtccagcgcgagccgggcgtcaccggggtgcctgcgctgctgctggtactgccagcggcacctccggccttgtcttcttccatctgcagcccggcctggcgcgcggcgctgcgcagtccggccgtgtccgtgcccggcttgagcgtcaccaccagcatgcggccgcggtactccagcgcctgcagcgcgtcgggcggcagcctgcgcgcggcctgggcaaagcggtcggccagcggcaggaagtcttccggcgtgctgcggccgctggcggtgcgcagctgctcgacctgccgccgcatctgcagcggcgcgtcgagcacggtctggatctgcgggaaggcgccgcgcagcgcctgcagctgcgcggcttccagccgctgctgctcgcgccgcaacagcagccagtgcgtgttcatgccaatgacctgcaccagcacgatgcccgccagcaatgccagcggcacgcgccatgccaccaggttccagcggtcggcccggccctgcgcgaattcaaactgcgccaggtccagcgccggctcgcgcaggcattcctgcgcgccttcgatccacagctgccagctggcgcgggcggcctggcgcaggtcgggcaccggcgccgcggcggcagcgtcggcatcggcataccaggtgccggcgggtgcaagcgcctgccacgcggccagggcatcgtcgcccagcagcaacccgtagccggcgtgtgcgccggtgcgtacggtcagttgccactggcgcgcggcgtcggagccggtgccgggcagctcgccgcctaactcatcgcccaactcgccgctccgggcgagggcgctggcggcggcttcgaccaccagcgcggccgccggcggcggcgcgtcggcgctcgccagtgacggctcggtgccggcttcagcggcggaagccagcggcacgcacagctgcgcggccagcacatggcggcgccggtggcggtgctcggcaaaggcgtcgagcacggcgcgcagccaggcgcggtcggccaccatcagcagccgctggcgcggtccgcgcgcggcgctgccgtcgagggcagggcccacgccgatatggcacggctgcgcctcggtcgcgagcgcgtcctcgaccaggttgggcagcgcctgtttcaaacgggcgggcggcagcggcggcacgctggcggtggtcagcagtacgtcgctggcggcgaggatcagcaccaggcgctcggccgcgggcaggtcagcgatgcgggcgtggccttcgcgcaacacttccggcgtcgcacgggcctggccacgccgcgccgtatcggccgtggcagtgcgcaccagcgcgaacggcagggtgccgaactgccacggttgcggctggtcatgcggccggtgtggcaggcggacgtacagggtggtgctcaaggtttccttgctttggcgtcaatggaacggctcgggcaggcgcatggccggttgggatgcgccctggatcgccccggagtcggaaacatgccggggtgcggggacgccggcgggcggccaggaaggccggacggcggcgggtaggctggtgccacgctcgcgccagcgccgcagcataccttgcctgtgtgactaaaccgcgtcaataccattctccccggttgcccgcgcgtgcaaattcggcctgtcgcctggcctggtgggcgccgcctagcgcaggtccggcagccggtccgcatcctggatccagaccacgcgggtggtgttggccgtacccagcggctcgccgcggaagaccagcgacacctgcagccgggtggcgcgctcgtgccgcaccagtccatagaccaggaagtagtgcgtgcgcacgtcgagcaggttgccgaggttggcggcatccgcctgcggtgccaccgcggccagctgggtctgcaggttgcccaggttgttgaagtgggcgcggtcgcgctggcgcaccagttcgcgcgcgcgctccagcggcagcttgttgatgaccgcggccagcacctcggcctcggcggtgttggcgttgaccggcgtgcgctcgggcagcacggtgacaaagggctccagcaccgccaccatctccggcgtgtagccgggcagcgccatcagcccctgcacgctgtccagcgggcgcggcgccggctgcccgctggcattgccgccctgcgcggcctgcagcatgtagcgcgccgtggtctcggccagctccgggttcaggccgaccgtctgcagcaggcggcggtatgcggccagcgccgccgggtcgaccgaggccgcgcggcctggctggccgtctgcgccgccagtggcggtccatatcaccaggttggccaggttcaggcgcgcctgcgcatccaggatgcggcccgacaggaacgaggtctcgcccgcgacgtcggtgcgcagtgccgcgccgaggaagtccgacagccgtgtctcggcgatcggcaccgcccacggctcgcccagttcgtcgacgttggtgcggcgctggtcgtcgcgcaggatcagccgcgcccagtccacggcggcgcgctcgatccaggtggcctgggccagcagccgctggttctcgatggcgcggatctgcacctgctggcgccacagcatgccggacaccaccaccacggccagcgtcacgatcagcagcgcggtgaccacggccgcgccgcgcgggcggcggcgcaactgcgccaggcgaggcgggcggctggcttgcctcatagcccggtcatgcagatcttctggaactgccgcggcgcatcgccgtcgcccatgcgggcgaagatggtcagttccaccgcgcgcaccgcggtgttgggcagcgcggcgccgggcgcggaggcggccacggcgctggcggcgttgcctgtgaacagcacgttgcggatgcgcccgctgtcggcctgccagccggcgggctccacccatgcgcgcgtgctgatgccgtccacgtcggccagcacgcgccgcacctgcgcggtgttgctgccgccctggcgcagcgccagcagggccgactgcaggccggcgcggctgttcaccggcggcgcggccacgcgcaccagggtattgccgtcgagctggtacgacagcgcctgccaggtcggcggctggccttcgtcgcggcggtcgcgcaccagcagcagccggttctggccgatctcgaccgggctggcctgcagcagcgtggggttggccaggtgctcgcaatcggcctggagctggccgtagagcaccttcagtgcgtccaggcgcgcatcgtggtcggtgaggcgctcgcggctgcgcgtcaggctgtccagcgcgcgccagccgatcaccgccatcaccgccagcagcgtgatggcgaccagcatctccagcagcgtgaagccgccgggctggcgctggcggcggcgctcagagcacgttgcgggtttcattggggactatggtgaccagccatgccaggcgtacggacttgtccgtggcggacgggtagaccgcgatctcgacgcggcggaaaacgggattgggcgtgcccgagacggcttgctcgcaatacagcggcgtgccgccctgcgggcaggcatagccgctgacgccgggctcgggccaggtcttggccaggcgcagcgcggccaggtggttctcggcgctccactcggccagcatgcgcgcctgcagcgacgcgctggcatcgaccatcgagcccatcgcgcgcatcgccgcggtcagcgcgaccgccaggatggtcagcgccaccagcacttcgatcagcgtgaagccggcgtggcgcccgcgccgggccggccggggcaaagcgcgagggcagggtttcatggcgtgctggcgaaatagcggccgctgccgtcgccggcaatgtccacgcggatatcgccgcgcaccaggatcagccgctgcggggcatcgatcagctcgcgcccgaagatcagccggggcgggctgctggtgccggtgctgcggcccccttcggcgacgatgacctggtccagcgccaggcgccagtggcccggggcaaacacgtcggtacgcatggggatccagccgttgggggtcgattccaggaagcgccagccgctggcatcgccctcccaggcgagcgggcgggcgccaagctgcgcctcctcctgcgccagctcgaacagccgcgcgatgcgctggccgtcgtcgagcacgcggctccgttcattgggcgaggcgttgaccgccaccagcgagatcacgatgccggcgatcaccatgaccaccagcagctcgagcagcgtaaagccgcggcgccgggggccgggcgcgcggcggcgcggcgccgtggtcatggttgcagggggcggcggcggggctgggcttattcccagttgccgatgtcggcgtcgttgccgttgccgccggcctggccgtcggcgccgaagctgaacacgtcgatctcgccgcgcacgcccgggttcaggtactggtacggatggccccagggatccttgggcagcttttccaggtagccgccgcccttccagttgttgggcacgggctcggtggtgggcttggccaccagcgcggccaggccctgctcggtggtggggtagcggctgttgtccaggcgatacagcttgagcgcctgcatgaccgacgagatgtcctggcgcgcggccacgatgcgggcctcgtccggacggctcatgatcttgggcaccaccagcgccgccagcacgccaaggatcacgatcacgaccatgatctcgatcagggtgaagccgcgcgcacggcgggcacgcacggaacgggcggggctggcaatctggggagtgaatctgcgcatcgtcggtggacctcttggcttgaatggctgggcccgcaccggtgagggggcgtcgggccgggttcgccagtcagtataaccggcgccacatgactgttttatgggcggccccttcggcacctcggcaaagtctgatccggatcacagttactaagaactggcatccggcagtcaaataacttgcatcctggatgcatcttttttaagatggcgtcacgatgcaactgacccgcttttccgactatgcgttgcgcctgctgatgtacgtcgcccgtggcgacggcagccggccgatcaccattgccgaggtggggcagcagttcggcatctcgcacaaccacctcgtcaaggtggcggcgcggctgtcgaagctgggctggatcagtgccacgcgcggccgccacggcggcctgcaactgggccccggcgccgagcggctgaccatcggcaccatcctgcgcgagctggaagggcacaaggcggtgatcgactgcgacaacccgccctgtgcgctgaacggcaactgccgcctgaagcgcgcgctggacgtcgccgagcaggccttctaccttgccctggacgacgtcacgctggccgatgtcaccggcagccagacggccgagtcgatcatccgcctgcatcgcgatttcctgaaccggcgttcggcctgagcggatcctgtccgtgcgggccggcgagagccggttttattttgagcaaaaacatgcatttaatttgcatgatttaaaacggagtgtttcctgatgctgtccgccgcttcccgcccctatatcgatgcaagcgtccccgtgctgcgcgagcacggcctggccatcaccacgcatttctaccgcgagatgttcgcggaccggcccgagctgacgcagatgttcaacatgggcaaccaggccaacggcagccagcagcagtcgctggcttcggccgtgttcgcctatgcggccaatatcgataacgcggcggcgctggggccggtgctcgagcgcatcgtccacaagcatgcggccgtgggcctgacgccttcgcactacccgatcgtcggccgccacctgctgggcgccatctccgcggtgctgggcgaggccgccacgccgccgctgctggccgcctgggacgaggcctactggttgctggccggcgagctgatcgccgccgaggcgcgcctgtaccagcgcaccggcgtggccgccggcgagctgacgccggtgcgcgtggtgcggcgcgaggcgcagggcgaccaggtggtggcgctgacgctggctgccgctgacggccagccgctgcgtgcgttccgcccaggccagtacatcagcgtcgaggcgcacctggacgacggccagcgccagctgcgccagtattcgctgtctgccgaaagcgggctgccgacctggcgcatctcggtcaagcgcgaggccggcgaccgcgccaccccggccggcgcggtgtccaactggctgcacgccaatgcccaggagggcactgaactcaaggtgagcgcgccgttcggcgagttcacgccggcgctggacggccgccgtccgctggtgctgctgtcggccggcatcggcatcacgccgatgctgtcagtgttgcgcacgctggccgcgcaaggctcgcagcgccaggtgctgtttgcccatgccgcgcgcgacggccgccaccacgcccatcgcgccgacctgcaatgggcgcgcgagcgcctgccgcagctggccacgcacatcagctatgaaaccccgcaagcgggcgacgtcgccggtcgcgactacgaccacgccggcaccatgccggtggccgaactgctgcgccagcatgacctgcagcgctttgtcgacggcagcttctacttgtgcggaccgctcggcttcatgcaggcgcagcgccatgcgctggtcagcgcaggcgtgccggtggcgcatatcgagcgcgaggtgttcgggccggacctgctcgacgacctgctctaaggggcggcggcgcggcaccggcacggcagacagtgtcatggggctctggtacgcttggcgcgtctgcgctcacgcgccattgcccgccttgtgggtatccagggtcccgatcccatgcaactgtccctccggccttcgctccgcttcgatgcctccgcgccctggctgccgcgcctggccagcctggtgctgtttatcgcgctgtgtgcgctcgccacctactgggtgctgaccttcagcgcgatgcgtaccatcccggtgccgcagagcgcgcgcgtggcccagaccgaggcggtcgagaccggcgcggtcgcgacgctgttcggcggctcggcgcagggcggcccgcgcgacgtgcagctgatcggcgtggtggccgaggtggatggcggcgcgggcgcggcaatcgtttcgatcgatggcggcccgcccaaggcggtgcgcgccggcgccgagctgtcgccgcagatccggctggcggagatccgccagcgtgcggtggtgatcgagcgcagcggcgtgcgccaggaaatcgtgctgccgctgcaggccggtgccacgcgcggcgcaccggcagcggccggtgccttgcccacgccgcccgccggcgccgcggcaccgatggcaacgccgatgccgcccccggcaccggtggtgagccagcccgccgcaccggcccagcagccgcaaggccaggcgccagcgcagcaggcccagcccgcccaaccgcagccgcaaccggtcgatccgcgccagtaccagccggcgatggcgccgcaggcggccggcgaaggccagctggcgccgaaggactgattccgggcgcgaaatattcgcgcttgcttgcgttcccttacggcgcgcgggcctttctgtgagcccggtaacatcgtattaaaagcgccaacttccccgcatcgtctgcgttctaatccgtacatgccaaacgtgatgaaaaggagcaagacatgcaacgcaatcacaagccgcagatcctgaagcagttcctggccgcatcggccgccctcctggtcgccggtggcgcatttgcccaggccagcgccccggcaccatccgctgcgccagccggcaagcccggcatgggtcaccaccagcaccacggtggcggcatgtggatgaaggcaatcgataccgacggcgatggcgcgatctccaaggcggaagccgacgcctggttcaacaagctcgacaccaaccgcgacggcaagatcgacaaggccgagatggacgcgcaccgcaaggccaccatggccgagcgccatgcgcgcatgcaggcagcgttcgacgagaagttcaaggctgccgacaagaacggcgacggcgcgctgaccaaggctgaggccaacgccggcctgccgcgcctggccaagcgcttcgaccagctcgacgccaaccgcgacggcaagctgacccgcaacgaaatccgcgccggcatggaaaagatgcaccgcgaccattcgcaccgcggcgaccgcggcccgcgtggccaggcggcaccgggcagccagccggcgcccgcggcaccgggcgccccgtccaccagcggcggctgaccggccaggcagggccgcgccagcggaccttgccaggcctcaccaagcgcgcgagccttagggttcgcgcgctttttctttgcctgttcgccttgtgcgcgcactgggaagaatctgacctcgcccgcaaacgcccgtagaatgccgcttccctgtttgccgggcttggcaccatccttgcctgcttccggccggcggagcgcgcggccgcgatttgcggtggcgccaccccacaggtctgcccagcccgaccggctgccgcgcgagtgaccgataaggctaccggctcatcagaatcggccctgaatcggacgtaatttcacaaaaaattgcgtacttgtgcacggcttgctaaatttgcgcaaaaaaattgccaataaacatattgcggagcaacaatatcgtgagcaaggtggagttggacaagatcgaccggaagatcctggaagtgctgcagaccaacggccggttgaccaacctggaggtggccgagcgcgtcaacctgtcgcccagcccctgcctgcgccgcatccggcggctggaggagatcggcgtgatccggcagtacgcagcgctgctggagcccaacaagatcggacttggcctgctggcctatatcaatgtccggctggaaaagcatggcggcgcgcccaagggcaaggctccgctggacctgttccgcgcctcgatcgcggtctggccggaggtggccgcgtgccacgccatgaccggcgagatggacctgctgctcaaggtctacgtggaagacatggaacacttcgcgcgcttcatgcaggagcagttgctggcgcacccgtcggtgatcgacgtgcgctccagctttgcgctggaaagcatcaaggacaccacggcgctgccggtgggcggcgcggcttgatacggcgaacctgaggccgcaaacaagaacggcgcatcgttgcgatgcgccgttggcgtggaacccgcattgagcgggcccggggagttcagcggactcaggcagtgtgcttctgcggcaccatggtgcgccagaagcgcagcccgaagcggcgcgcgtcgcgcaggttgcggcgcaccgcgtagtccaggtcggcgagctgctcgtccagcgcttcggtcaggcggctggcggtgtcggccggcggcagttccaggtaggcatcggcctcgccgtaggcgtactggaccttcatgccggccttcttggcaatgtgcatcatcgccgcgttgcgcgacaggcagtgcatgtacagcgtgcgcacattggtattgcggccgtggatcgcggcacgctcgaacagcgcgctgccgatgccgcgcccgcgggcgctgcccgacaccgacacgccgaactccgccacgcggccctgggcgttgtcgcgcaggttggcgaagtggcccacgccgatcagttcgagcttgtcgtcgtagacgccgaacacgctgtcatggtcgaagtcgatgctgtcgacataggcttcgatcacgtggtcgcccacggactggccaaaacggagcaggcgatcctcctcgcccagggcgaggaaatgcttcagcaggcgcgagcggtggtgggccgccagctcgcgcaccagtacggtggcgcggtgggtggcctgtgcggcttcggctgccttgcgcagatcttcgtcggtcagtgcgccgacggccttgctcagttcgagcggattcacgttatttccttccaggtgcaatcacagataaacatagcactgcgttggtgtttttccaggcacttttccctgcttcggtgcaggattcggggaaacaccatcttgatgcggagccaaaagtattgtagtggaattgtcagttcggcgtaagcttcccgcgtcgcagcaagccgccgtctcaccacagcatcaataaaaatcgaataaaatcaaaagcttgagaaaatgtgatgaattgttgcgtggtgccagatgtggatttggtgcaacgccgcaatcccgcgttctcccgcatctccgtctgacttccccttgcccagccgatcgcctttgatgaccgagcccccaatcgttgtgatctacgcgcaccccacgcccagccgttcgcgcgtcaaccgtccgctggccgatgccttggccgcgctgccgcaggtacaggtacgcgatctctaccgcagctatgtcgactatgacatcgatgtcgtcgccgagcagcgcgtgctgtcggtctccgacaccatcgtgctgcagttcccggtgcgctggtacagcgtgccggcgctgctcaagctgtggctcgacgaggtgctggagccaggctgggcctatggccccggcggcactgcgctgcgtggcaagtccttgctggcggtggtgagcaccggcggcaccgccgattcctacgggccggacggcacccatggccacccgatcggggacttcctgctgccgctggaacagaccgccttgctgtgcggcatgagctggctcccgccggtggtgctgcacgacgccaacaatgccgatgcccaggcgctggccgagcatatcgcccacgtctgcgggcggctgggcaccggcgccgcgccggcggggggacaggcatgaaccagcacgacttcctgattgcgctgctggtgttcctggtggcggcggtggtggcggtgccgctggcgcggcgcagtggcctgggcgcggtgctgggctacctgctggcgggggcggcgatcgggccgtttgcgttgcgcctggtgaccaatgtcgaatcgatcctgcatttctccgagttcggcgtggtgttgatgatgttcgtcatcggcctggagctggagccgcgcaagctgtgggcgctgcggcggagcatctttggctacggcggcgcgcagctggctgcgtgcgcgctggtgatcggcgcggtcgcggcgctggcgggcgcgccgtggcaggtggcgctggtggcgggcctgggactggcgttgtcgtccaccgcgatcgcgctggcgacactgaccgagcgcaacctgttcggcacgccggcgggggccgccagcttcggcatcctgctgttccaggacatcgccgcgatcccgatgatcgcgctgttgccgctgctggccacgcagggcgccgcaggcgcgggtccgggcgcggccggctggctggcggcgggcaaggcggtggtggtgatcggtgcggtggtggtcggcggccgctacctggtgcgcccggcgctgcgctttatcgcccgcaccgacatgcgcgagatgttcacggcgtttgcgctgctgctggtggtgggcattgcgttgatgatggacgcggtgggcttgtcgatggcgctgggcaccttcgtggctggcgtgctgctggccgattcggaataccgccatgcgctcgaggccgacctggagccattcaagggcctgctgctgggcctgttcttcatggctgtcggcatgtcgatcgactttgccgtgctggcacactcgccctggctggtgctgggtctggtggccgccttcgtggttgccaagaccgcggtgctggcgctgctggcgcggtattttgccatcgcccgcgggcagcggctgctgtttgcgctgctgatctcgcagggcggtgagttcgctttcgtggtgttcggcgtggccggcaccgccggcctgctgccgcgcgagaccgaggccctgctggtgctggtggtggcgctgtcgatggtggccacgcccttgctgctgctggcctatgaccggctggtggcgccgcgcctgggcagcggcaaggcccgcccggacgaggccatcacgccgcagcacaatccggtgctgatcgccggtttcgggcgcttcggccagatcgtcggccgcctgctgtacacccagggcgtgggcgtgacggtgctggaccacgaccccgaccagatcgagttcctgcgccagtacggcttcaaggtcttctatggcgacgccacccggctggacctgctggaggccgcgggcattgccgacgcgcgcatcctggtggtggcgatcgacggcatggacgaaagcctggaactgatcgaccgcgtgcgccagcgctttcccgaactgcagatctacgcccgggcgcgccatgtgtcacatgtctaccagctcaaggaccgcggcgtgcacctgttcgagcgcgagatgttcgagggctcgctgatgctgggccgccgcgtgctggaggggctgggtttcgatccggccgaggcccgcaacgtggcactgcgtttccggcgccacaacatccaggcgatcgaccgcttctatccgcactacaccgaccagaagaagctggtctcgctggcgcgccaggcgcgcgacgaactggaagagatgttccgccaggaccgcgagcagcggcgtcagcgcgaagaggccgagtggatgtgagcggcagggcggcgggccagcgccgcgtcagcgcgcggccgcggcccggccgggcaggccgccttcgagcaggtcgaccaccatctcggcaaactctgcataggacaaccggccgcctggcttgagccaggtgaaggtccagttgatcatgccgaagatggtcatggtcagcgcggtctggttctcgcgcgtgacgcgctccgggtaggcccggcgcagcaggcgcgagaacgccgcgaccacgtcgcgctcgcggcccaggatcaggtcgcgctgggtctcggccaggaacttgacgtcgttgatcagcgcgatatggcgcgtctgcgaggtctcgtactcggccaggaaggcgcggatcaggttgccgaaggcttccttgtcggtgcgcgcgtggcgctcggcgtcggcctccacttcagtgacgagcagcatcagccggcgcgtgtagcggtccagcaggtcgaacaggatcgcttccttgctctcgtaatagtggtacagccgcgccttggaggtgccgcaggcggcggccaggtcggccatcgaggtgctggggtagctgctgttggcaaaggcggcggcggccaggtccaggatctgctcgcgctgcgcctcgaaatcgggtgccttggtacgggccatattctcgtttattcgccgccggtgccaccgctgccgagatggcggcgcagttcgcaggtatcgagcgagtcagcattgccgcgcagcaccagctggcccatggcgatcagctcgcggcagcgccagaacacgaaccagtcgctggccagcagaccctcgatcgcgcccatcacgctgcccaccatctgcgccgcgggcgtccactccgacggggcgcgttccatgatgatctcgtcgatggtgtggtaggccgccggcaccagcgtgttgcccttccagagccgcacgtcggcgttttccttgacgttctgctgccactcgtagccgaggcggcccaggcgcagcaccgagaccggggcgatggtggaaaagcgccgcgccagccgcgcgggcgtgtacatgccgatcgccgccaggttgccctgcgcgggcatttccagctcgcgcaggtccatggcgacttcattgatccgctgcggcgcctggtacaggtggaacaccacccggcgcagcatcagctggtcagccgcgctctggccgtgccagatggccacttccatgttgtcctggcgcagtccctggagctggtccagcgcctggcgcatctcggcgccgaaatcgatgtcggtatgcggggcgacccgctgccagaagccggagcggatcaggccggtgctgtcgatgtcggccagcgggcctaccgccaggtcgtcgcgcagcaccacgacagggtccggccgcgcagcctgggccagggcctggcgcagggtcgtgcctgctacatcaccgttgacgacgtggatatattgcatggccgtgattgtatatgggtggacggttcgctggcaccgccgcggcggcggtgcgacaggcgcgatcgccgcccgcccggtcactgtcctgcaagcatcgcgccagcccgaagccgcctgccgccattgtagtcacggccggtgctggccaatgtcggcaattgtctgaatacacacgccccggcgtgcccggatcagcgttcgtcgtagctgactaccacccgcggcgtcagcgcccgcgcctggcaggtgagcacgaagcccttttccatctcccacggctcgagcgtgtagttcttttccatgtccacctggccctccagcaccttggcgcggcaggtgcaacagacgccgctcttgcaggcaaaaggcaggtccaggccggcggccagcgcggtgtccagcacggcgtcttccagcggcaggcgcatgctgtgctgcttgccgtcgagcaccaccaccagctcggcggtgccggcatggtcggcgtgcgccggggccggcttgcgcctggcctgggccagcggcacaccgaagcgctcggcgtggatgcggtgcgggtcgacgcccgcgtcgcgcagcgccgcctcggactcgtcgatcatcgaggccggcccgcagacaaaggccgcgtcgatgtcttccacggggatcagggtctgcaggaaggcggtcacgcgggcatggtcgagccggccatgcagcaggtccacctcctgcggctggcgcgacagcacgtggtagagcgtgaaacgcgccaggtactggttcttcaggtcttccagcgcctcggagaagatgatgctgtcgacgttgcggttgccatagaccagcgtgaagcggctgtgcggctcggcctgcagcgtggtgcggatcagcgacagcaccggcgtgatgccgctgccggcggcaaatgccacgtagtggcgcgcggcgccggcatcgagcggcacgtgaaagcgaccgtcgggggtcatcacgtcgatcacctggcccggggcgatggaatcatgcaggtgcgtggaaaagagtccgtcctcgaccagcttgaccgccacgcgcagctcgccgtgcgcgtcgtagtcctgcacggccgagcagatcgagtaggagcggcgcaggtccttgccttcgaccggcgccttcagcgtcaggaactggccctgggtgaagcggtaggcgtcgcgcagcgcgtccggcacctcgaaggcgatcgaaatcgtgtcggcggtctcggggcgcacctgcgccacgcgcagcggatggaactgtggagtcatggcagcctggcttcggcccggcggggctcagtaaggtttgaaatagtcgaacggctcgcggcagtccaggcaccggtacagcgccttgcaggcggtcgaggcaaagcgcgagatttcctgcgtatgcatgctgccgcagcgcgggcaggccacggcatcgggcgcgcccgcgcgggcggcgcgaggcacaaagcgcagcggctgcgccgcggccggcgtgccgcactggcccggcggtgctatgccgaaggcgcgcaggcgctcgcgcgcggccggggtgatccagtcggtggtccaggccggcgccagcacggtgcggatgcgccacggcgccagcccggcgccgtccagcgcccggccgatgtcctcggcgatctgcgacatcgccgggcagccggaataggtgggcgtgatgacgatctcaagcgcgccgtcggcggcggtcaggacatctcgcaggatgcccaggtcgcggatcgataccaccgggatctccgggtccggcaccgcccccagcgccgcccatgcacgcgcgatgcggccgtcggtggcgcggtcgttgcgcagggggagggcggcgatgttcatgttggtcaaccctttgcgccgaagcgggcgcttaccattgcgcgcccggatgggcccgcgccagcccctgcatctcgcccagcaggtagctcatgtgttcggagtgcacgccgtgcttgccggtcgagacaaagctcgtggcctggggcaagtccagcgtggcggcctgcagcgtctcggcgacggtggcgtcccaggccgggcgcagcgtggccgtgaccacgccgatgccctgcgtggcggcctcggtttcgaccgcgtcctcggcaaagcactcgttcatatagggcagaaggtgctccagcgcgcgctgcatgcgcgcgtgcgatgcctcggtgccgtcgcccaggcgcactacccagccagccgcgtggtgcaggtggtagcgcgcttccttgaccgacttggcggcgatcgcggccagctggtcgtcgtggctggccagtaatgcttcccacagctcgaccatcagcgcgctgtacaggaagttgcgcatgatggtgacggcgtagtcgcgctcggctgcggcgttgccggccagcgggccgcggtgcggcagctccagcagcgtccagttgcggaagtcgcgctcggcacgccagtaggtgtagtcgtcctcatggcggggcaggccggtcagctcgccttccagttcgccggcgcggccgtacagcagccgtgcctggccgatcaggtccaggctgatgttggccagcgcgatgtcttcttccagcaccgggccgtggccacaccattcggcgttgcgctggcccaggaccagggcgttgtcggccaggcgcagcacgtagcgcaagcccgcagtgcgtgccggcggcaggtggtcgagcgaggcgggcgcggtcggctgtggggacgcagtcatggtgcgggccttacatgtggttgacttcgtcgggcagctggtagaacgtcgggtgccggtagatcttgtcggccatcgggtcgaacagctccggcttttcctcgggcacgctcgcggtgatggacgctgacggcaccacccagatcgacacgccttcctggcgccgcgtatagacgtcgcgcgccatgtgcagcgcctgctgcgcgtcggcggcatgcaggctgccgcaatgcttgtgttccaggccttgcttgctgcgtacgaacacttcccacagcggccattccttgcgttgcatcgtttgtctccgtcctcgggcgtgttgtcaggccgcggcgcggctggcgcgggcttcgcgttcggccaccttggcggcgtgcgccagcgcggcctcgcgcacccaggcgccgtcctcgtgcgctttcacgcgggtggccaggcgctccttgttgcaggggccgtcgccgttgatcacacgccagaactcatcccagtccagcgggctgtagtcatagtgggcgcgctcggcattccattgcaggccggggtcgggcagggtcacgcccagcacgcgggcctgctcgaccgtggcatcgacaaacttctggcgcaggtcgtcgttggagatgcgtttgatgccccaggccatggtctgggcgctgttggtcgaggccgcgtcgggcgggccgaacatcatcagcaccgggaaccaccagcggtcgaccgcgtcctgcaccatctcgcgctgggcctcggtgccgcgcatcatcgccagcagcgcgtcgaagccctggcgctggtggaacgactcttccttgcagatgcggatcatggcgcgcgcatacgggccgtacgagcagcggcacagcgggatctggttcatgatcgccgcgccgtcgaccagccagccgatcacgcccacgtcggcccaggtcagcgtcgggtagttgaagatcgacgaatacttggccttgccgctgtgcagcgcgtcgaccaggtcatcgcgcgaggcgtcgagcgtctcggcggcggaatacaggtagagcccatggccgccttcatcctgcaccttggccagcaggatggccttgcgcttgagcgacggggcccggctgatccagttgccctccggcagcatgccgacgatctccgagtgcgcatgctgcgagatctggcgcaccagggtcttgcggtaggcctgcggcatccagtcctgcggctcgatcttgccgtcggcggccatgcaggcgtcgaacgcggcctggcgggcggcttcgtcctggggcgcgctggccggtgccgtatcggcgtgctggccgggcaggtcaagactctgcgtgtacatggtgtctcctctgacgggatgccgcccggatcgcgggcagtgctggccctattatatatatgccgaccggtcggtcaatttaagggaaggcccgctaccgtggccgtggcttgatcccgctcgcctcgtggcggctgccgcacgtgtagtatcgaagtcaggcggcgttaccgcccccatccctttccaacggaggcaattcctatgactagcgcggcatacagcaagatcgtggtggcggtggacggcagcagcacgtccgacctggcgctgggcgaagccatacgcgtggcggctccgggcggcgccaccgtgctggcgctctatgtcgtggacaccggcacgcccatgttcgatgccgggtactacgatccgagccagctgcagaaggcgttcgaggaaagcgggcagcgcgcgctgcaggccgcctcgcagcggctggccgcggccggcgtggcgcatgaaacccggctggtgaccgaagcgccggtgccaggcgacatgggggcctcgatcaacgaggccgcgcgccaatggggcgccgacctgctggtgatcggcacgcacggacgccgcggcgtgcgccgtctggtgctgggcagcgtggccgaggcggtgatacgccagtccaccatgccggtgctgctggtgcgcggcgaggcgaaggctgactgaacggccgaatgaaatcgtgccccccatcggggacgccagggcagccgacgggactcagccggcgaagcggaaatggccgctgcgcagcacgatctcgcgcgcctcggtcagctcgaacatgctttcggccaggcgctcgatgcgctggcggttgctggtgaaggctgcgaccaggtcttcctcgcgcggcgaacgcgcgccgaaatgggcctcgagggcctcggcggtgacggaatacagggtgggactgccgttgaccgtggcggggcaggacagcgtgaggctggctgcgcagtaggtcgggaggctgcgagggaacgtgatgtcggacatggcgtgcctcgtgctggcggcgagcgtattagatcaatataggccattgccgcgttccgtaaagcccggccgttacgctggccgggccggcaagcttctttcttgatgcctctcagccgctgtgcgcccgccggcgcaccggcggcttgcgcgcggccgcgcccagcgtgcgcaggtccgccaccgcggcatgggcggcggcgatatgcgcggcggcgtagtcggcctgttccgccaggaaggcgtcgagcgcgccagcgggtggcagcgcgggccgctcggtgtcgccggcagcgtctgccaggcccggccgcatcgccagctcggccagttgggcttccagctgcgtcaggagtgcgcgcacttcagccccggcgggaagcgtgaaaacgcccgactccaccccggctcgcaccacgccggccagcgcggccatgcggcgtgcgctcgcatgcacgcgctggtaggccccggtatagtccggcgccagcgcgccggcggtctgtgccagcgtgagttcggcgcgggtggaagcccgtccggcggcaatgcgtaaggcttccagccgcggcacggcaggcggcgtcgcggcctcagccacgcggctggccgcgaaggcggctcgcaggtagaccgcgttgaccgccaccgcgtcgacggcatggcggaacacgcgcgacatctccacgcgcggtgccagcacatagtacgtggccagcgcgatcaggcagcccagcgcggtatcgatgccgcgcagcgcggcaaagtggctgctgtcgagggccggcgcgcccacccatgagaacaggatcacggccggcgtcaggcagaacgcgaacgccccgggctgcccggcaaggcggctggcataggccccggccaggaaggccgcgctgatgcccagcgccaccaccggcgccggttggagcaggccgatcacacaggcgcacaatgcgccagccagcgagcccgcaaagcgtttcacggaaacctgccgggtagtctgcaactgggggctgagcaccatgatcacggtcaccgccacccaatagccatggtccagccgccaccactgcgccggcagcaggctgaggctgccggccagcgccaggcgcagggcgtggcgcgtggccagcgcatcgcctgcggcgtggtcggccagcccgcgcagcatctgggccagcccgtgcccgatgccgcgccgcggccagcggaagcttgcgcgccatcggtcgaaatccggatggcgcgccagggcggatagtgccgactggtaggggggcggggcgctggcattggccacgggcgcggtcaggcgccgcagttcgtggcgcagcgccgcgctcaatgccggcaggtcgggcgcgtgccgcgccagggcctggccaacttgctcgcgggcgtcggcgatgcagcgtgcgatatgacgcaacggcggctgcatcggcaagccatgggcggtgccggcgcgctcgcgcagctcgcccgcgacgatcagcagcgcaaacagggcgtcggcgacacccacggcatagccatagtgcaggagcgtgctggggtcgcgcaggctgcgtcgggcctcgatggccccgcgcgcagcctcgatgcggttgcggatgtcctgcttgcaggtggcgaggtcattgccgtggcgggtgtcggcgagtgccgtggcgagccggaccagcgcgtcgtatgcggccacgatctcggtgcgtggccggtcgtcgcgggtcgacgggatcaatgccaggcaagccaggcacgcgaacacgccgccgcgcaggaagtcgagcccgctttgcagggcctgcacggcgagctcaggcccggccgcaggctgcaggcacgcggccaccagcacgacatagagcagcttggccgccagcgcactggccgggccgcgcgtctctgccagacctgcggcaagccctcctgccatcacgaccagtacggccagccagggcgaaggcgcgacggccgcgcccagcgcgctggctaccgccccgccaatgccgaccgctcccaggctggatagccgtgccgacgccgtgccttgccggtctgccaggcaggtccagatcgaggccgttgccgaccacaggtagcctgcatccccggtcagccagccaataccggcaagggccaggaacgacagtgcatagatgatcccgcgccggagcaggacggggtcaggccagtagcgggcaaggagggcggaggcgaacatgcgggccgggatccactcgggcctgcccggtcgggcgcccgtcgtgagaccactctacgataccgtttgctgcgttgcaacaaaactggcctgtcggccacggcatcaggttgccgcaccaaggtggcgcgagcaagccccgtggcgaggatccaagcacgattgctgcgccagcaggcgcaaacgtgcacaggggttgtgaccgcttcggcgcgaaggcgaaaaaaaaacccacgcaggttgtgcgtgggttggaatccaccgaggtggtggaggagacagactccaatatacatgatttgttgcgacgcaccaagtggtcatgtgtcaatgtccgacattgcgcacaatggcgttgtatcgatgcgacaaaatccggtttccagcatccatgtcctagcggaacagatatgcggcacctacggcacacatgatcccggcagcatcggccaccagtgcacaacccagtgcgtggcgcgtattgcgcacattgatgctgccgaagtagaccgccagtacatagaaagtggtctcggtcgagccctggatgatcgccgccagccgtccctggaacgagtccacgccataggtcgtcatcacatccaccatcagcccgcgcgcgccggcgccggacaggatcttcatcagcccgaccggcagcgccggcacgaagtccgtattcatgcccagctgggcaaagcccagcgtcagccagcccatcagcacgtccatgcagccggtggcccggaacaggccgatggctacgaggattgccaccaggtagggaataatctgcacggcgacgccaaagccttccttggcaccatcgataaaggcttcatagacattgacccgccgcagcgcgccgcagagcaggaacagcgtgatcagcgacaggatgaagccggcgccggccagtgccgtcacgctgccgacctgctccggcggcgcgtgccgcagccaggcgaacatcccgcccagcagcgcagcgaccagcccgaacgccaccagcacggccgggcgcagcaggttcagccgctgcacccacgccaccgccagcaggccggccaggcatgagccgccggtggccagcagcgtcggcaggaagatatcggccgcattgaaacccgccagcccttgcttgaccgcaatggcctgccggatcgcgatcaccgaggtcgggatcagcgtcagcccggccgtattcagcacgatgaacatgatctgcgcatcggtggccacgtctgggcgccggttcagtgtctgcagctcgcgcatggcattcaggccgagcggcgtggcggcattgtccagcccgagcaggttggccgacacgttcatcatcatcgccccctgtgccggatgcccctgcggcacgccggggaagaaatggcgcagcagcgggttcaccagccgggcaaaggcatcgaccacgccggcgcgctcgccgatgcgcatgatgccgagccacaggctcatcaccccggccaggccgagcgcgatctcgaaggccgtgcgcgcactgtcgaacaggctcgccagcatcgccgggaacacggtgagatcgccgctggccaggcggacgcaggcggcgacaaaggaaatcaggaagaaaccgagccagacaacgttcagggccatcggaatgcgggaaggggggaaatcaaagccggggagattcccggcacggcgtgcagctcagccgatcacggccccgcgttcggccagcagctcgcgcaggatcgagcggtggcagtgcgcttcgttctcgcagtagcagcctaccgagaaattggtctggtgcgacagcgccgccagcaggtcgagcgtgcggctggcgtccggctcggccatttccttgcggaagtgccgcacgaacgcccgccattgcttgtcatcggtggcctgcagcgcctgggccaccagctcgggcgatggcgacagcacgggataccagacatcgtagaaatcgcggctggcaaactcggatttgggcacgccccgcggcggccggcgcacagtgccgatgcgcaggccttcatcgtccgcgcgcggcgtgcccagtcttacgattcggatggtcatgggggatcccgctcatgtctgccgacgcatgtgcgtccggctaaagtcccagatcatgaatcatggtgtcgcgcatgacaaacttctgcaccttgcccgtcacagtcatcggcatttccgagacaaagcggatatagcgcggaatcttgtagtgggcgatctgatcgcggcagaacttccggatctcttcctcggtggcgctctggccgggtttgagcacgatccaggcgcagacctcctcgccgtacttctggtcaggcacgccaaagacctgcaccgcctgcaccttgggatggcggaacaggaattcctcgatctcgcgcgggtagatgttctcgccgccgcggatcagcatgtccttgacccggccgacgatgttgcagtagccctcgtcgtcaatggtggcaaggtcgccggtgtgcatccagccgtcgcggatggcctcgcgggtgcgctcgtcgtcttcccagtagccttgcatcacggaatagccgcgggtgcaaagctcgccggtggcgccggtcggcacgacctcgccgagggcgtcgaccaccttgcattccaggtgcggctgcacccggccgacagtggcgacgcgcttgtccagcggatcgtcggtggcgctctggaacgagaccgggctggtctcggtcatgccataggcaatggtgacctccgacatatgcatgtccgccaccacgcgtttcatgacctcgatcgggcagggggcgccggccatgatgccggtgcgcagggccgagaagtcgaagcggctgaactccggatggtccagctgggcgataaacatggtcggcacgccatgcagggcggtgcagcgttcctcgctggccgcctgcatggtcgcgagcggatcgaaggcctcgcccgggaacaccatgcaggcgccgaccgagacgcaggccagcaccgacagcaccatgccgaagcagtgatagagcggcaccgggatgcacagtacgtcactgtcgccaagtcgcatcgctatggcgacaaagcggccgttattgaccacgttgtgatgcgtcagggtggcgcccttggggttgccggtggtgccgctggtgaactggatattgatggcgtcgagcgcggagagcgtcgcggtcaccgcgtccaggcgcacagtatcgggttcggccagcagtgcatcgtaattgagcatgccgggcgtcgcctcgcctcccatgcggatcacccactgcagccggggcagccgggcggagcgcagcgcccccggctcggcctcggccagttccggcgccagcgcctggagggtggccaggtagtcgctggccttgaaacgcgcggccgtgatcagcatgcgcacgccggccttgttcagcgcatattccagctccgcccggcggtaggccggattgatattgaccaggatggcgccgatacgagcggtggcgaactgggtcaccagccactcgggccggttcggcgcccagatgccgacccggtcgcccggctggatcccgcgccggagcaggccgctggccaggcgatcgacctggtcgctgaactccgcccagctccagcgcacaccatgctcgcggaacaccacggccggggcgcccgggtttgcggcgaccgtgcgcgccagcaatgccggaatcgtctcatcagacagggggatgtcggtgctgccggcgaccacggagaggccgggcgtcacgggtcgggtcatcttgtctccttcaactgctctgcttggcattcgacgtctatatataaagaggacgtctcgggttgggccgacgcccacggtctcagcttaagccgaggcgccgctggatgctgtcaccaccgcgacatttgagcctcgtgcgccgcttttacggggggttcgaattatttcgcgaaatcgcttgccagtcggtcctgcgtcccttaatattcgccccctcgcaacacaacgcagcgctgcaaagcagacgcagcaagggttgcggggtcgaccgggatggttggcgcagcgaagtttgcagcgctgaccgcagcgaaaaaagatgctgaaacggttgacgaaacgaagaaagctctgcataatctcgtttctctgctgcagacaacgcagcggcgctgaacggcaaagccggcggcgaagttctttaacaaccaaacaaccgataagtgtgggcgctgggtagcggacgccgctgtcttcggacagtgttgcttcacaagttatacagtgctcgcacagcaaaacgtgactggatcttcggatctggtcagtcagttttctgagagtgagcgaccgctcgaaagagcgaggaccttcgggtccacacagagattgaactgaagagtttgatcctggctcagattgaacgctggcggcatgccttacacatgcaagtcgaacggcagcacgggcttcggcctggtggcgagtggcgaacgggtgagtaatacatcggaacgtgccctgtagtgggggataactagtcgaaagattagctaataccgcatacgacctgagggtgaaagcgggggaccgcaaggcctcgcgctacaggagcggccgatgtctgattagctagttggtggggtaaaagcctaccaaggcgacgatcagtagctggtctgagaggacgatcagccacactgggactgagacacggcccagactcctacgggaggcagcagtggggaattttggacaatgggggcaaccctgatccagcaatgccgcgtgtgtgaagaaggccttcgggttgtaaagcacttttgtccggaaagaaatggctctggttaatacccggggtcgatgacggtaccggaagaataagcaccggctaactacgtgccagcagccgcggtaatacgtagggtgcgagcgttaatcggaattactgggcgtaaagcgtgcgcaggcggttttgtaagacaggcgtgaaatccccgagctcaacttgggaatggcgcttgtgactgcaaggctagagtatgtcagaggggggtagaattccacgtgtagcagtgaaatgcgtagagatgtggaggaataccgatggcgaaggcagccccctgggacgtcactgacgctcatgcacgaaagcgtggggagcaaacaggattagataccctggtagtccacgccctaaacgatgtcaactagttgttggggattcatttcttcagtaacgtagctaacgcgtgaagttgaccgcctggggagtacggtcgcaagattaaaactcaaaggaattgacggggacccgcacaagcggtggatgatgtggattaattcgatgcaacgcgaaaaaccttacctacccttgacatgccactaacgaagcagagatgcattaggtgcccgaaagggaaagtggacacaggtgctgcatggctgtcgtcagctcgtgtcgtgagatgttgggttaagtcccgcaacgagcgcaacccttgtctctagttgctacgaaagggcactctagagagactgccggtgacaaaccggaggaaggtggggatgacgtcaagtcctcatggcccttatgggtagggcttcacacgtcatacaatggtgcgtacagagggttgccaacccgcgagggggagctaatcccagaaaacgcatcgtagtccggatcgtagtctgcaactcgactacgtgaagctggaatcgctagtaatcgcggatcagcatgccgcggtgaatacgttcccgggtcttgtacacaccgcccgtcacaccatgggagtgggttttgccagaagtagttagcctaaccgcaaggagggcgattaccacggcagggttcatgactggggtgaagtcgtaacaaggtagccgtatcggaaggtgcggctggatcacctcctttctagaggcttgtgtctcaagcctagcgttcacacttatcggtttgtttgctgttacagccaagggtctgtagctcaggtggttagagcaccgtcttgataaggcgggggtcgtaggttcaagtcctaccagacccaccaagttatccggaagggggattagctcagctgggagagcacctgctttgcaagcagggggtcgtcggttcgatcccgtcatcctccaccactgcctggtaccttggattggttgtcaaatgaaagcgcatcgcgacgatgagtggcgagtgtttccatttggcattgccaagcgatcgcaagatcggctgttctttaaaaatatgggatgtagtaaaggtgtcgcgcgagcgttgatgagacgctgcagtacaagacgcgataccgggttgtgattgtatcaaccaaaatgtatttaagtgatcgaaagatgacttggaatacggcacaaatgcgagaactcatcctgtagcgaggtttcgagcaatcgagacacactcgttatagggtcaagcgaacaagtgcatgtggtggatgccttggcgatcacaggcgatgaaggacgcggtagcctgcgaaaagcttcggggagctggcaaacaagctttgatccggagatgtccgaatggggaaacccggcccgaatgggtcatcccacactgaatccataggtgtgggaagcgaacgcggcgaactgaaacatctaagtagctgcaggaacagaaatcaaccgagattcccaaagtagtggcgaacgaaatgggaagagccttgtactctttagcagtggtgttagcagaacgggatggaaagcccggccctagcaggtgatagccctgtatgcgaaaacacgattgtggaactaggtgtacgacaagtagggcgggacacgtgaaatcctgtctgaagatggggggaccatcctccaaggctaaatactcgtgatcgaccgatagtgaaccagtaccgtgagggaaaggcgaaaagaaccccgggaggggagtgaaatagatcctgaaaccgcatgcatacaaacagtcggagcctcgtaaggggtgacggcgtaccttttgtataatgggtcagcgacttacattcagtggcaagcttaaccgattagggaaggcgtagcgaaagcgagtccgaacagggcgttgagtcgctgggtgtagacccgaaaccagatgatctatccatggccaggttgaaggtgcggtaacacgtactggaggaccgaacccactaacgttgaaaagttaggggatgagctgtggataggggtgaaaggctaaacaaatctggaaatagctggttctctccgaaaactatttaggtagtgcctcgtgtctcaccttcgggggtagagcactgtcatggttggggggtctattgctgattaccccgccatagcaaactccgaataccgaagagtgcaatcacgggagacagacatcgggtgctaacgtccggtgtcaagagggaaacaacccagaccgccagctaaggtccccaaatatagctaagtgggaaacgaagtgggaaggctaaaacagtcaggaggttggcttagaagcagccaccctttaaagaaagcgtaatagctcactgatcgagtcgtcctgcgcggaagatgtaacggggctaagctatataccgaagctgcggacgcacagcaatgtgcgtggtaggagagcgttctgtaagcctgtgaaggtgtcttgtaaaggatgctggaggtatcagaagtgcgaatgctgacatgagtagcgataaagggggtgaaaggccccctcgccgtaagcccaaggtttcctacgcaacgttcatcggcgtagggtgagtcggcccctaaggcgaggcagagatgcgtagctgatgggaagcaggttaatattcctgcaccgtcgtatgatgcgatggggggacggatcgcggaaggttgtccgggtgttggaagtcccggtccctgcattggagaaggcgctcaggcaaatccgggcgcgggattcaaggatgcggggcgagcggcctagtgctgcgaagcaattggaagtggttccaagaaaagcctctaagcttcagtcatacgagaccgtaccgcaaaccgacacaggtgggcgagatgagtattctaaggcgcttgagagaactcgggagaaggaactcggcaaattggtaccgtaacttcgggataaggtacgccctggtagcttgactggcctgcgccagaagggtgaaggggttgcaataaaatggtggctgcgactgtttaataaaaacacagcactctgcaaacacgaaagtggacgtatagggtgtgacgcctgcccggtgccggaagattaaatgatggggtgcaagctcttgattgaagtcccggtaaacggcggccgtaactataacggtcctaaggtagcgaaattccttgtcgggtaagttccgacctgcacgaatggcgtaacgatggccacactgtctcctcccgagactcagcgaagttgaagtgtttgtgatgatgcaatctccccgcggctagacggaaagaccccatgaacctttactgtagctttgcattggactttgaaccgatctgtgtaggataggtgggaggctttgaagcgtggacgctagttcacgtggagccgtccttgaaataccaccctggtttgtttgaggttctaaccttgacccgtgaatccgggtcggggacagtgcatggtaggcagtttgactggggcggtctcctcccaaagtgtaacggaggagttcgaaggtacgcttggtacggtcggacatcgtacctaaagtgcaatggcaaaagcgtgcttaactgcgagaccgacaagtcgagcaggtgcgaaagcaggacatagtgatccggtggttctgaatggaagggccatcgctcaacggataaaaggtactctggggataacaggctgataccgcccaagagttcatatcgacggcggtgtttggcacctcgatgtcggctcatctcatcctggggctgtagccggtcccaagggtatggctgttcgccatttaaagaggtacgtgagctgggtttaaaacgtcgtgagacagtttggtccctatctgccgtgggcgttggaatcttgacgggggctgctcctagtacgagaggaccggagtggacgtaccgctggtgtacctgttgtctcgccagaggcatcgcagggtagctatgtacggaagagataaccgctgaaagcatctaagcgggaaactcgcctgaagatgaggattccctggcggcttgaccgccttgaagggtcgttcgagaccaggacgttgataggctgggtgtggaagcgcagtaatgcgttaagctaaccagtactaattgcccgtaaggcttgatcctataaccagtgtgttttgcctggtgagtcgatcgccttgtgccagatacgcacaaccccaactacatccctattcgcagcgttgacctcaacctcagcgctgcaacccctcatgcctggtgaccatagcgagctggaaccaccccttcccatcccgaacaggtccgtgaaacagctccgcgccgatgatagtgcggattcccgtgtgaaagtaggtcatcgccaggctcttattcccaaaacccctcgacagcgtgtgctgcgaggggttttgtcttttccggctcgtggtggcgagcggcctcgcggggcctgccaggcggcctcagagcctccaggagcgacgctggaaagcccctatagggtgagaacgcagaaatctaaactgcgcttgtgggagcgatcaggcggttcaagcgccatgctggaacgccttccctggtctggtcaagtacaacatccgcaacggaaagtgcttgacaggcaaggtgagaagccccataatcgatagttctctgcggagaggtgcccgagtggctaaagggggcagactgtaaatctgttggcttacgcctacgctggttcgaatccagccctctccaccagaatgcaagacagcagccggcagtgccggtgaagaagcaggaaagaaccgggcgggtgtagctcaatggtagagcagaagccttccaagcttacgacgagggttcgattcccttcacccgctccagtcgcgcggttgctgtcagagtagtacgtcaagtttcgcccatgtggctcagtggtagagcactcccttggtaagggagaggtcggcagttcgatcctgcccatgggcaccaaataccacgcactggcaatatcgctaccgagacaggagtcgcgaaatggcaaaggaaaagttcgagcggaccaagccgcacgtgaacgttggtacgattggtcacgttgaccatggcaagaccacgctgaccgcagcgattgccacggtgctggcagccaagttcggcggtgccgccaagaagtacgacgaaatcgacgcagcgccggaagaaaaggcacgcggtattaccatcaataccgcccacgtcgagtacgaaacggccaaccgccactacgcgcacgttgactgcccgggccacgctgactatgtgaagaacatgatcacgggtgccgcccagatggacggcgcgatcctggtttgctcggctgctgacggcccgatgccgcaaacgcgtgagcacatcctgctggcccgccaggttggcgtgccgtacatcatcgtgttcctgaacaagtgcgacatggtggacgacgctgaactgctcgagctggtcgagatggaagttcgcgagctgctgtcgaagtacgagttccccggcgacgacaccccgatcatcaagggttcggccaagctggcgctggaaggcgacaagggcgagctgggcgaagtggccatcatgaacctggccgacgcgctggacacctacatcccgacgccggagcgtgccgttgacggtaccttcctgatgcctgtggaagacgtgttctcgatctcgggtcgcggcaccgtggtgaccggccgtatcgagcgcggcgtagtgaaggtcggtgaggaaatcgaaatcgtcggtatcaagccgacggtgaagaccacctgcaccggcgtggaaatgttccgcaagctgctggaccagggtcaagccggcgacaacgttggcctgctgctgcgcggcaccaagcgtgaagacgtcgagcgcggccaggtgctgtgcaagccgggttcgatcaagccgcacacccacttcaccggcgaggtgtacatcctgtcgaaggacgaaggcggccgtcacaccccgttcttcaacaactaccgcccgcagttctacttccgtaccaccgatgtgaccggctcgatcgagctgccgaaggacaaggaaatggtcatgccgggtgacaacgtgtcgatcaccgtcaagctgatcgccccgatcgccatggaagaaggcctgcgcttcgctatccgcgaaggtggccgtaccgtcggcgccggcgtcgtggcaaagatcctcgactaagttgtttgatagcgaacgcggcaccaaccggccgcgttcgttgccagaaggggttggcgccagcgccggccccacagtttttttaggggtatagctcaactggcagagcgtcggtctccaaaaccgaaggttgggggttcgattccctctgcccctgccaaatcaatcagccgcgtcgcgaagagcaatcgtgacgcggcttagtctcgtttgcgaaacatggccaatcccaatgttgaaaccgtgaacgccagcagcggcaagtggatgcttggcgtggcggtgctgctggtggttgcgggcgtcatcggtttctatgcactggcacagcaaccgtcttatgtacgtggcgccgcactgttcggtggtattgcactgggtatcgtagttgcgctggtgtcggcaccaggcaaggactttatcgggttcgccaaggaatcgtatcgggaagttcgcaaggtcgtctggccgacgcgcaaggaagccgggcaaatgacggggctggtcttcgtctttgtcgtcatcatggcgctgttcctgtggtcggctgacaagctcatcgagtgggtcgtcttctcgctcgtgctgggctggaaataagaggtagcacatgacggataacgctcagcaggaaaccaccgcgccggaatcgccttcgtcgaagaagcgctggtatgtcgtgcatgcctattccggcatggagaagagcgtgcagcgcgcgctgcaggagcgcatcgaacgcgccgagatgcaggacaagtttggccgcatcctggtgccgtccgaagaagtcgtggaaatcaagggcggccacaagtcggtcaccgagcgtcgtttcttccccggctacgtgctggtggaaatggaaatgaccgacgagacctggcacctggtgaagaacaccagcaaggtcaccggtttcgtgggcggcgcccgcaaccgcccgagcccgatttcgcagcgcgaagtcgacaagatcatgacccagatgcaggaaggggtcgagaagccgcgtcccaagacgctgttcgaagtgggcgaaatggtgcgcgtcaaggacggcccattcaccgatttcaacggcaacgtggaagaagtgaattacgagaagtcgcgcctgcgcgtctcggtcacgatcttcgggcgtgccacgccggtcgaactcgagttcggccaggtcgagaaggtttaaggaatttgccggttgcggcctgaaagggcggcaacgggcaacggcgccgccccggtggcggcgccaagaggagcgtgaggccgtgccgaaggtgcggcgacagcgcgttacgactcaacaggatcgcatcccgaaagagcgatccggattggagtagagatggccaagaagatcattggctttatcaagctgcagattccggctggtaaggcaaatccctccccgcccgttggtcccgcactgggtcagcgtggtctgaacatcatggagttctgcaaggcgttcaacgcccagacccagggtatggaacccggtctgccggtgccggtggtgattaccgccttcgccgacaagagcttcaccttcgtgatgaagtcgcccccggcgaccgtgctgatcaagaaggcagcaggcatcaccaagggttcgccgaagccccacaccgacaaggttggcaagatcacccgcgcccaggctgaagaaatcgccaaggccaagaacgctgacctgaccgccgccgacctggacgccgctgtgcgtaccatcgccggttcggctcgttcgatgggcatcaccgtggagggtctgtaaatggctaaggtttccaagcgcgtcgccgccaacaaggcgaagatcgagcgtaccaagttttacccgatcgacgaggccctgggcctggtgaagggctgcgcttcggcgaagttcgacgagtcgatcgacgtggccgtgcagctgggcattgacgccaagaagtcggaccaggtggttcgtggttcggtggtgctgcccgcaggtaccggcaagtcggttcgcgtggctgtgttcgcccagggcgaaaaggccgaagccgccaaggccgccggtgctgacatcgtcggcatggaagacctggccgagcaagtcaaggccggcaacctgaacttcgacgtcgtgatcgcttcgccggacacgatgcgtatcgtcggtacgctgggccagatcctgggcccgcgcggcctgatgccgaacccgaaggtcggtaccgtgacgcccgacgtggcccaggctgtgaagaacgccaaggctggccaggtgcagttccgtgtcgacaaggccggtatcatccacgccaccatcggccgccgctcgttcgacgacgcagcgctgaagagcaacctgtccgcactgctggaagccctggtgaagtccaagccggctacgagcaagggcgtgtacctgcgcaagatcgccgtctcgtccaccatgggcgttggcgtgcgcgtggaacaagcttcgctgtcggcctgagctgacggcatgggctgaccggacccgataacaccggtcggccgcgaattgaagatcctggcgtaagcggggatcggctccgaacctggttctgccaagcggcagcacaaggacagggagcaaggctttgggcagtggcggcagtcggacacgttgtgttcaggcagtcgccgctggttatcaaagaccgctggtgtccacatgaccgcagtcaggcatgcgggcttaatcggccgggaggtacaagcagggccaggtgccgtgcatgaccaaccccgggcagccagcgcagatggcgcacccgaagggattgatgaatccgggcctgtcccgggtgattcgggccaatcggacgccgttcgtttgtgctgacgtgaagactccggtattgccggagggctagcgtcattttggagcttaaccgtgccactcaatattgaagataagaaggccgtcgttgctgaggtttcggcgcaagtcgccaaggcccagaccatcgtcgtggccgaatatcgcggcattacggttggcgatctgaccaagctgcgttccaccgcacgtcagcaaggcgtgtacctgcgtgttctgaagaacacgctggcccgccgcgccgtcgaaggtacgccgtttgcaagcctcgcagagcagatgaccggtccgctgatctacggtatttccgaagatgcagtgtcgtcggccaaggttctgaacgacttcgccaagaccaacgacaagctggtcctgcgcgccgggtcgtatgacggcaaggttctcgacgctgccgccgtgaaggcgctggcctcgatcccgagccgcgacgaactgattgctcagctgctgggcgtgatgcaggcaccggtgtcgggcttcgcccgtctgctggctgcactggctgccaagaacgccgaaggtgctcccgcggaagcggaagccgctggcgcctaaggcaatccaggcctcgcatcgaaagatcgcattaccgataccgaatcaaatctagtaggagtatttcaaatggcaatcaccaaagacgacatcctggaagccgttggcgcgatgtccgtgatggaactgaacgacctggtcaaggcgttcgaagagaagtttggcgtgtcggctgctgccatggctgtggctgctgccccgggcgccggcggtgccgccgctgctgaagagcagaccgagttcaacgtgatcctggccgaagtcggcgccaacaaggttggcgtgattaaggctgttcgcgaaatcaccggcctgggcctgaaggaagccaaggacctggtcgatggcgcaccgaagcccgtcaaggaaggcgtggacaaggctgctgctgccgaagccaagaagaagctggaagacgctggcgcgaaggtcgacgtcaagtaaggcattgctcgcgtgccctttcggcacgcggatggggctggcaaagggaaattcccggcgccagcctttttgcgcttgtgcgaaagtgttttgagaagcactcttcgcaacaaaaagtgatgtttgcgagtctcgatgccctcgggcatgccggagtctcagcagaggccaaacatcagtggcacactaagtggttgctgctgatgtttgtcttctgaaccgactgcagaagacaagtttggtcgggtgtcccccgggcgagtacaggcgttgcgcttgatgcgacgaccacaccgcccgcagcgtgcggacaccgtcagccagaggttggtagcggccaaccgccaaatcccctcccagtcgctgaacacctcaggtccggccaggtccagccagccctgcgatgattcggagatcccatggcgtacagcttcaccgaaaagaagcgcattcgcaaaagctttgcgaagcgcgcgacggtacatcaggttccattcctgcttgccacccagattgaatcctacactcagttcttgcaagcggaaacgccgaccgcgcgtcgcaagaccgaaggcctccaggccgctttcaacgcaatcttcccgatctcctcgcataacgggcttgcccgtatggagttcgtctcgtatcacctgtccaatccgccgttcgacgtcaaggaatgccagcagcgtggcctgacgttccactcggccctgcgtgccaaggttcgcctgatcatcaacgatcgcgagaacccgggcaaggtcaaggaagtgaaggagcaggaagtctacatgggcgaaatcccgctgatgacttccacgggttcgttcgtcatcaacggcaccgagcgtgtcatcgtctcgcagttgcaccgctcgccgggcgtgttcttcgagcacgacaagggcaagacccacagctcgggcaagctgctgttctcggcacgtatcatcccctaccgcggttcgtggctggacttcgagttcgacccgaaggacatcctgtacttccgcgtcgaccgccgccgcaagatgccggtgacgatcctgctgaagtcgatcggcctgaccccggaacagatcctcgcgcacttcttcgtgttcgacaacttcacgctgcaggccgaaggcgcgcagctggagttcgtgcccgagcgcctgcgcggtgaagtcgcgcgcttcgacatcgccgacaagaacggccgcgtggtggtcgagaaggacaagcggatcaacgccaagcacatccgcgacctggattcggccggcaccaagctgatcagcgtgccggaagactacctgctgggccgcgtgctggccaagaacatcatcgacccggataccggcgaggtgattgccaacgccaacgacgagctgaccgaaaccctgctcgagaacctgcgcgaagccggcgtcaagcagatccagaccctgtacaccaacgacctggaccagggcccgtacatgtcgcagaccctgcgcgtggacgagaccgccgaccagaccgctgcgcgtatcgcgatctaccgcatgatgcgcccgggcgagccgccgaccgaggaagccgtggaagcgctgttccagcgcctgttctacagcgaagagtcgtacgacctgtcgcgcgttggccgcatgaaggtcaacagccgcctgggccgccccagcggcgaaggcgccatggtgctgcaggacgaggacatcctcgagaccatcaagatcctggtcaacctgcgcaacggcaagggcgaggtcgatgacatcgatcacctgggcaaccgtcgcgtgcgttgcgtcggcgaactggccgaaaaccagttccgcgccggcctgtcgcgcgtggagcgtgccgtcaaggaacgtctgggccaggccgagaccgagaacctgatgccgcacgacctgatcaactcgaagccgatctcgtcggcgatccgcgagttcttcggttcgtcgcagctgtcgcagttcatggaccagaccaacccgctgtccgagatcacgcacaagcgccgtgtctccgcactgggcccgggcggcctgacgcgcgagcgcgccggctttgaagtccgtgacgtgcacccgacccactatggccgcgtgtgcccgatcgaaacgccggaaggtccgaacattggtctgatcaactcgctggcactgtatgcccgcctgaacgaatacggcttcctggaaacgccgtaccgcaaggtggtcgacagcaagctgaccgaccaggtcgactacctgtccgcgatcgaggaaggcaagtacgtggtggcgcaggccaacgcgaccgttgacgccgacggcaacctgaccgacgaactggtgtcggcgcgtgaaggctccgagcgtgaaacccgcatggtcacgccggaccgcgtgcagtacatcgacgtggcgccgtcgcagatcgtgtcggccgctgcctcgctggttccgttcctggaacacgatgacgcgaaccgtgcactgatgggcgcgaacatgcagcgccaggccgtgccttgcctgcgtccggacaagccgctggtcggcaccggcatcgagcgcaccgttgcggtcgactcgggtacggccgtgcaggcgatgcgtggcggcgtggtcgactacgtcgacgcgatgcgtatcgtgatccgcgtgaacgacgacgaagccgttgccggtgaagtcggcgtggacatctacaacctgatcaagtacacgcgctcgaaccagaacaccaacatcaaccagcgtccgatggtgaaggtcggcgaccacgttgcccgcggcgacgtgattgccgacggcgcctcgaccgacctgggcgagctggcactgggccagaacatgctggtggcgttcatgccgtggaacggctacaacttcgaggattcgatcctgatctcggagcgtgtggtggccgaagaccgctatacctcgatccacatcgaggagctgtcggtcgttgcccgcgacaccaagctgggaccggaagaaatcacgcgcgatatctcgaacctggccgaagcccagctggctcgcctggacgagtcgggcatcacctacatcggcgctgaagtcgaagccggcgacgtgctggttggcaaggtcacgccgaagggcgagacccagctgaccccggaagagaagctgctgcgcgcgatcttcggcgagaaggcttcggacgtgaaggacacctcgctgcgcgtgccctcgggcatgagcggcatcgtgatcgacgtccaggtcttcacccgcgaaggcgtgacgcgcgacaagcgtgcccagtcgatcatcgacgacgaactgaagcgctaccgcctggacctgaacgaccagctgcgtatcgtggaaggcgacgcgttccagcgtctggagcgcctgctcatcgacaagaccgtcaatggcggtccgaagaagctggccaagggtgccaagatcaccaaggaatacctggcggatatcgacaggtaccactggttcgacatccgtccggccgacgaagaactggctgcccagctggaagccgtcaaggaagccatcgagcagaagcgccacgagttcgacctggccttcgaagagaagcgcaagaagctcacgcagggcgacgaactgccgccgggcgtgatcaagatggtcaaggtgtacctggccgtcaagcgccgcctgcagcctggcgacaagatggccggccgtcacggcaacaagggtgtcgtgtccaagatcaccccgatcgaagacatgccctacatggccgacggtacgcctgccgacatcgtgctgaatccgctgggcgtgccttcgcggatgaacgtgggtcagattctcgagacccacctgggctgggccgcgcgcggcctgggcgagcgcatcggcaacatgctgaaggcgcaagccaaggcagccgaagtgcgcaagctgctcacgcagatctacaacgagagcggcaaggtcgaagacctcgacagcctgtcggattcggaagtcctggagctggccgagaacctgaagaagggcgtgccgttcgcgacgccggtgttcgatggtgcgcatgaggacgaaatccgccgcatgctggacctcgcctatccggaagagatcgcgaaggagaagggcctgaccgcttccaagcagcaggtcacgctgttcgacggccgcaccggcgaagcgttcgagcgtccggtcacgctgggtgtgatgcacatgctgaagctgcaccacctggtcgacgacaagatgcacgcgcgttccaccggcccgtactcgctggtgacgcagcagccgctgggtggtaaagcccagttcggtggccagcgtttcggtgagatggaagtttgggcactggaagcctacggcgcgtcgtacgtgctgcaggaaatgctgacggtcaagtccgatgacgtgaacggccgtaccaaggtgtacgagaacatcgtcaagggcgagcactcgatcgatgccggcatgccggaatcgttcaacgtgctggtgaaggaaatccgctcgctgggtatcgacatcgacctcgatcgctactgatcgggcaggtgaggggagccggttgcggccggctccctgtcgacactacaggcgaaggatttcccacaggatgaatgccatcgacccggaccaactccggggcggtggcgaaacaaggagttgcaatgaaagcattgctcgatctctttaagcaggtacagcaggaagagcagttcgacgcgatcaagatcggcctggcctcgcccgagaagatccgttcgtggtcgtacggcgaagtgaagaagccggaaacgatcaactaccgtaccttcaagccggaacgcgacggcctgttctgcgccaagatctttggcccgatcaaggactacgagtgcctgtgcggcaagtacaagcgcctgaagcaccgtggcgtgatctgcgagaagtgcggcgttgaagtgacgctggccaaggtgcgccgcgagcgcatgggccacatcgaactggccgcgccgaccgcgcacatctggttcctgaagtcgctgccgtcgcgcctgggcatggtcctggacatgacgctgcgcgacatcgagcgcgtgctgtactttgaagcattcgtggtgatcgaacccggcatgaccccgctcaagaagagccagatcatgtccgaggacgactacctggcgaagtgcgacgagtacggcgagggcgagttcgtcgccatgatgggtgccgagggcatccgtgaactgctgcgcggcatcgacatcgagaagcagatcgaacagatccgcgccgagctgcaggccaccggctctgaagccaagatcaagaagttcgccaagcgcctgaaggtgctcgaggccttccagcgttcgggcatcaagcccgagtggatgatcctcgaagtgctgccggtgctgccgcccgagttgcgtccgctggtgccgctggacggcggccgcttcgcgacctcggacctgaacgacctgtatcgccgcgtcatcaaccgtaacaaccgcctgaagcgcctgctggagctgaaggcgcctgaaatcatcgtgcgcaacgaaaagcgcatgctgcaggaagcggttgactcgctgctggataacggccgtcgcggcaaggcgatgaccggtgccaacaagcgtccgctgaagtccctggccgaaatgatcaagggcaagggcggccgtttccgtcagaacctgctgggcaagcgcgtcgactactcgggccgttcggtcatcgtggtgggcccgacgctcaagctgcaccagtgcggcctgcccaagctgatggcgctcgagctgttcaagccgttcatcttccacaagctggaaacgatgggcatcgccaccaccatcaaggcggcgaagaaggaagtcgaaagccagaccccggtggtgtgggacatcctcgaagaggtgatccgcgagcacccggtgatgctgaaccgtgcgccgacgctgcaccgcctgggtatccaggcgttcgagccggtgctgatcgaaggcaaggccatccagctgcatccgctggtctgcgcggcgttcaacgccgacttcgacggtgaccagatggctgtccacgtgccgctgtcgctggaagcgcagatggaagcccgcaccctgatgctggcctccaacaacgtgctgttcccggccaacggcgatccgtcgatcgtgccgtcgcaagacgtggtgctgggtctgtactacacgacccgcgacaagatcaacggccgcggcgagggcatgacctttgccgacatcagcgaagtgattcgcgcctacgagaacaaggaagtcgaactggcttcgcgcgtgaacgtgcgtatcaccgagtatgagctggtcgacaaggacgccgagggcgacgcccgtttcgcacccaagatcacgctgcaggccaccacggtcggccgcgcgatcctgtccgagatcctgcccaaggggctgccgttctcggtgctgaacaagccgctcaagaagaaggaaatctcgcgcctgatcaacaccgcgttccgcaagtgcggcctgcgcgagactgtgatcttcgccgacaagctgctgcagtcgggcttccgcctggctacccgtgccggtatctcgatcgccatcgacgatatgctggtgccgccgcagaaggaaaagatcatcgccgaggcctcggccaaggtgaaggaatacgacaagcagtacatgtcgggtctggtgaccgaccaggaacgctacaacaacgtcgttgacatctggggcgccgccggcgaccaggtgggcaaggcgatgatggagcagctccagcacgaggacgtggtcgaccgcgaaggcaagaccgtgaagcaagagtcgttcaactccatctacatgatggccgactcgggtgcacggggctcggcagcgcagatccgccagctggccggtatgcgtggcctgatggccaagccggacggctcgatcattgaaacgccgattacggcgaacttccgtgaaggcctgaacgttctgcagtacttcatctcgacccacggcgcccgtaagggcctggccgatacggcactgaagaccgcgaactcgggttacctgacccgtcgtctggtcgacgtgacgcaggatctggtcgtggtggaagacgattgcggcacctccaacggcgtggccatgaaggccctggtcgaaggcggtgaagtgatcgaagccctgcgcgaccgtatcctcggccgtgtgaccgtggccgacgtggtcaaccctgaaacccaggagaccgcgatcgaagccggcacgctgctggacgaagacctggtcgagctgatcgacaacatcggcgtggacgaagtcaaggtccgcaccccgctgtcgtgcgacacgcgctacggcctgtgcggcaagtgctatggccgcgacctgggccgcggcgtgctggtgaactccggcgaagcggtgggcgtgattgccgctcagtcgatcggtgagccgggcacgcagctgaccatgcgtacgttccacatcggtggtgcggcatcgcgtgcggcagtggcatcgagcgtggaagccaaggcaaccggtaccgtgcgtttcacggcgaccatgcgttacgtcaccaatgcgaagggcgaactgatcgtcatctcgcgttcgggcgaggcgctgatcaccgacgaccacggccgcgagcgcgaacgccacaagatcccgtacggcgccacgctgctggtgcaggacggccaggccatcaaggctggcacgcagctggccacgtgggatgcgctgactcgcccgatcgtttcggaatacaccggtacgaccaagttcgagaacgtcgaagaaggcgtgaccgtcgccaagcagatggacgaagtgacgggcctgtcgaccctggtcgtgatcgacgccaagcgccgcacggctgcaaccaagggcatccgcccgcaggtcaagctgctcgacgccaacggccaggaagtgaagatcccgggcacggaccactccgtgaccatcggcttccaggtcggcgcgctgattaccgtgaaggatggccagcaggtgcacgtgggtgaagtgctcgcgcgtatcccgaccgaatcgcagaagacccgcgacattaccggtggtctgccgcgagtggccgagctgttcgaagcgcgttcgccgaaggacgccgccgtgctggcggaagtcaccggcacgacctcgttcggcaaggacaccaagggcaagcagcgcctggtcatcaccgacctggacggcaatgcccacgagttcctgatcgcgaaggaaaagcaggtgctggtgcacgacggccaggtggtgaacaagggcgaaatgatcgtggaaggtccggcggacccgcacgacatcctgcgcctgaagggcatcgaagagctggcgcactacatcgtggacgaagtccaggacgtgtaccgtctgcagggcgtgaagatcaacgacaagcatatcgaagtgattgttcgtcagatgctgcgccgcgtgcagatcgccgacgtgggcgacaccaagttcatcccgggtgaacaggtggagcgttcggaactgctcgacgagaacgaccgcgtgatcgccgaaggcaagcgtccggccacgtacgagaacctgctgctcggtatcaccaaggcgtcgctgtcgaccgacagcttcatctcggcggcatcgttccaggaaaccacgcgcgtgctgaccgaagccgcgatcatgggcaagaccgacgacctgcgtggtctgaaggaaaacgtgatcgtcggccgtctgatcccggccggtaccggcctggcctaccaccgcgcccgcaaggcgcgcgaggcctccgagcgcgaacgcgcccaggcgatcgccgaagaagagcagtcgctcttcatcgagccggcgccggtggtgcaggcgacgaccgaaggcgaaggcgacaacgcctgatcgcagtaagctgtttgccgccgcaaggtggcccgaaagcccggctgatccagccgggctttttttctttccgcccgcagccggccctgtcgtgagaatgttcggactgttagcccggcgggcacggaagcggcccccttagtggtatggttacggcttttccggcttcagcaattccgttgtctatgtcgcacgcgctggcgatcctcaaagatgtgttcggctaccacgccttccgtgggcgccaggccgagatcatcgaccacgttgcgacgggcggcgactgcctggtgctgatgccgaccggcggcggcaagtcgctgtgctaccagatcccggcgctgctgcgccagcgtgccggcgatggcgtcggcatcgtggtgtcgccgctgatcgcgctgatgcaggaccaggtcgcggcactgactgaagccggcgtgcgcgccgcagtgctcaattcgacgctgaccggagccgaggcctcggcggtcgagcgcgacctgctggccgggcgcatcgagatcctctacgtggcgccggagcggctgatgacgccacgcttccaggacttgctcgagcgcattcgggtcgggctctttgccatcgacgaagcgcactgcgtgtcgcagtggggccacgacttccgccccgagtacatccagttgtcggtgctgcacgagcgcttcccatacgtgccgcgcatcgcgctgacggcaacggccgacgcactcacgcgcaacgagatcatcgagcggctggcgctggacaacgcccgcgtcttcatctctagcttcgaccggcccaatatccgctaccgcatcgtcgagaaggacaatgcgcgccagcagctgctggccttcatcaaggccgagcacaccgcggccgacggcacccatgacagcggcatcgtctattgcctgtcacgcaagaaggtggaggacacggcgcagtggctgagcggacagggcatcaatgcgctgggctaccacgccggcatggatgcccaggtgcgccagcaccaccaggcccgcttccgcgaggaagaagggctggtgatggtggcgacgatcgccttcggcatgggtatcgacaagcccgacgtgcgctttgtcgcccacctggacctgcccaagagcatggaaggctactaccaggaaaccgggcgcgccggccgcgacggcctgccggccaatgcctggatggcctacggcctgggcgacgtggtgcagcagaagcgcatgatcgacgagtccgaggcggacgacgccttcaagcgcgtgtcgtcgtccaagctcgatgcgctgctgggcctgtgcgagaccgcaggctgccggcgcgtgcgtatcctggcgtatttcaatgaggccagcgaaccctgcggcaactgcgacacctgtctggagccgccggccacctgggacggcacgcgcgaggcgcagatggcgctgtcctgcgtgtaccgcaccgcgcaggcgagccgggttcacttcggcgcgacccacctgatcgacgtgctgcgcggcaacagctcggagaagatccgccagtgggggcacgacaaggtgtccaccttcggcatcggcaaggaccgctcggtgcatgaatggcatacggtgttccgccagctgatcgcccagggtctgctgaccatcgaccatggcgggcatggcgcgctgctgctgggcgaggacgcgcgcgcggtgctcaagggcgagcgccagatcatcctgcgccgccaggccaccaagccgggcaagtccggcgagcgtgccgcacgcggcacccgcaccgaccacaccgcggacatggacgcagacatgctggccaactgggaggcgctgcgccgctggcgcaccgaggccgcgcgcgagcacggcgtgccggcctatgtcatcttccacgatgcaacgctggcggagctggcccggaccgcgccgggctccctgtcggcgatgcagggcattcccgggatcggtgcctccaaactggagcgctatggacagtccatcctggaagcgctccgcggggtctgaccgagggcagcgtcagcgcgtcccgggtcgggtatacggcttgacggtatacgattcccctgctaggatgccagattcgagtttttggctttggatttcgctcgcccgtcggagaagtggcctttaggccgcggccggcaagccttccggactgggttcccatggaccggtggcggcagacgcgggatccgggtgccggctcgcgctctttggcatgctgttaccgcacagtcccgtctccagagcgcgtccgctcatctctcccgcccaaaacccgtagttgcctctccatttcggtgcatgccggtgcgaggggcgtttttcgtcaaaccaagctggattgaacaatgccaactatcaaccaactggttcgcaagccgcgcgtctctgaagtcgtcaagagcaagagcccggcgcttgagaactgcccccagcgccgtggcgtgtgcacccgcgtgtacaccacgacgccgaagaagccgaactcggcactgcgtaaggttgccaaggtgcgcctgaccaacggtttcgaagtgatttcgtacatcggcggtgaaggccacaacctgcaggaacactcggtcgtgctgatccgcggcggccgtgtgaaggatctgccgggtgtgcgttaccacatcgtccgtggctcgctcgacctgcaaggcgtgaaggaccgcaagcaggctcgttcgaagtacggcgcgaagcgtccgaaggcagcctaagctatagcagcctgggtcggaaagacccgaagcaacaaacgatagcctgtggcgcgagtcatggtgctgtcaccaggcggcggtacaacggagcgcctttttggcaaccgtgccgtcgagtaagtggtcacccggcgaatttgctgtctatcgcatgcaagctagttggtggccggagagcgggaaaaactgaccacgctctcaactgaatctaaaggaaagaagatgccacgtcgtcgtgaagtccccaagcgggatgttctgcctgatccgaagttcggcaacgttgaagttgccaagttcatgaacgtgctgatgctggacggcaagaagtcggttgccgaacgtatcgtctatggcgcgttcgaccagatcgaaaagaaggcaggcaaggcccccatcgaagtgttctccgttgccatcaacaacgtgaagccggtggtggaagtgaagagccgtcgcgtgggcggcgccaactatcaggttccggtcgaagtccgtccgtcgcgtcgtctggcattggcgatgcgttggctgcgcgaggccgcgaagaaacgcagcgagaagtcgatggcgctgcgcctggcaggtgagctgctggaagcatcggaaggccgtggcggcgcaatgaagaagcgtgacgaagtgcaccgcatggccgaagccaacaaggcgttctcgcatttccgcttctaagcgcgcgatagcgtttgttggttgccgggcgggctgtgtttttacacatctcgcccgtttgtgttaggggcgcgggccatgagatgccggcgcctcacggacgaatagaggattaaagtggctcgtaagactcccattgagcgctaccgcaatatcggtatctcggctcacattgacgcgggtaaaaccaccacgaccgagcgcatcctgttctacaccggtgtgaaccacaagatcggtgaagtccatgatggcgcggccaccatggactggatggagcaggagcaggagcgcggcatcaccatcacgtctgctgcgaccaccgccttctggaagggcatggccggcaactaccccgagcatcgcttcaacatcatcgacaccccgggccacgtggacttcaccatcgaggtggagcgttccatgcgcgtgctggacggcgcgtgcatggtgtactgcgcagtgggtggcgtgcagccgcagtcggaaaccgtctggcgtcaggccaacaagtacaaggtgccgcgtctggcgttcgtcaacaagatggaccgtaccggcgcgaacttcttcaaggtctacgaccagctgaagacccgcctgaaggccaacccggtgcccgtcgtggtgccgatcggcgctgaagacggcttccagggcgtcgtcgatctgctggaaatgaaggcgatcatttgggacgaagccagccagggcgtgaagttcgaataccaggacatcccggccgagctgcaagccaccgctgacgaatggcgcgagaagatggtcgagtctgccgccgaagccagcgaagagctgatggaaaagtacctgggcggcgaagagctgacccgcgccgagatcgtcaaggcgctgcgtgaccgtaccatcgcctgcgaaatccagccgatgctgtgcggcaccgcgttcaagaacaagggcgtgcagcgcatgctcgacgccgtgatcgacttcctgccgtcgccggtcgacattccgccggttacgggcacggacgaggacgacagcgagaagaagctcgagcgcaaggctgacgataacgaaaagttctcggcactggcgttcaagatcatgaccgacccgttcgttggtcagctgatcttcttccgcgtgtactcgggcaagatcaattcgggcgacaccgtgtacaacccggtcaagagcaagaaggaacgcctcggccgtattctgcagatgcatgccaaccagcgcgaagaaatcaaggaagtgctggccggcgacatcgccgctgcggtgggtctgaaggacgcgaccacgggcgacacgctgtgcgatccggctgcaccgatcgtgctcgagcgcatggtgttcccggagccggtgatctcgcaggctgtcgagccgaagaccaaggctgaccaggaaaagatgggcatcgccctgaaccgcctggccgctgaagatccgtcgttccgcgtgcgtaccgatgaagaatcgggtcagaccatcatttcgggcatgggcgagctccacctcgaaattctggtcgaccgcatgaagcgcgaatttggcgtggaagccaacatcggcgcgccgcaggtggcttaccgcgaaaccattcgcaagacggctgaaggcgtcgagggcaagttcgtcaagcagtcgggcggccgcggccagtacggtcacgctgtgatcacgctggagccgcaagagccgggcaagggcttcgagttcatcgacgccatcaagggcggtgtgattcctcgcgaatacatcccggcggtcgaaaagggtatcgtcgacacgctgccgaacggcatcctggctggcttcccggtggtggacgtgaaggtcacgctgacgttcggttcgtaccacgacgtggactcgaacgaaaacgcgttccgcatggccggctcgatggctttcaaggaagccatgcgcaaggccagcccggttctgctcgagccgatgatggccgtggaagtggaaacgccggaagactacacgggtaccgtgatgggcgacctgtcgtcccgccgcggcatcgtgcagggcatggacgacatggtgggcggcggcaagatcatcaaggccgaagtcccgctgtcggaaatgttcggttattccacgtcgctgcgctcggccacgcaaggccgcgccacgtacaccatggaattcaagcactacgctgaagcaccgaagaacatcgccgaagccgtgatgtcggccaagggcaagtaattggaagtttgccgccgcgcctgccggtgcggcggcgcgatgaaacaacaagactgcattcctatcaggagttaagaaatggcaaaggaaaagttcgagcggaccaagccgcacgtgaacgttggtacgattggtcacgttgaccatggcaagaccacgctgaccgcagcgattgccacggtgctggcagccaagtttggcggtgccgccaagaagtacgacgaaatcgacgcagcgccggaagaaaaggcacgcggtattaccatcaataccgcgcacgtcgagtacgaaacggccaaccgccactacgcgcacgttgactgcccgggccacgctgactatgtgaagaacatgatcacgggtgccgcccagatggacggcgcgatcctggtttgctcggctgctgacggcccgatgccgcaaacgcgtgagcacatcctgctggcccgccaggttggcgtgccgtacatcatcgtgttcctgaacaagtgcgacatggtggacgacgctgaactgctcgagctggtcgagatggaagttcgcgagctgctgtcgaagtacgagttccccggcgacgacaccccgatcatcaagggttcggccaagctggcgctggaaggcgacaagggcgagctgggcgaagtggccatcatgaacctggccgacgcgctggacacctacatcccgacgccggagcgtgccgttgacggtaccttcctgatgcctgtggaagacgtgttctcgatctcgggtcgcggcaccgtggtgaccggccgtatcgagcgcggcgtggtgaaggtcggtgaggaaatcgaaatcgtcggtatcaagccgacggtgaagaccacctgcaccggcgtggaaatgttccgcaagctgctggaccagggtcaagccggcgacaacgttggcctgctgctgcgcggcaccaagcgtgaagacgtcgagcgcggccaggtgctgtgcaagccgggttcgatcaagccgcacacccacttcaccggcgaggtgtacatcctgtcgaaggacgaaggcggccgtcacaccccgttcttcaacaactaccgcccgcagttctacttccgtaccaccgacgtgaccggctcgatcgagctgccgaaggacaaggaaatggtcatgccgggtgacaacgtgtcgatcaccgtcaagctgatcgccccgatcgccatggaagaaggcctgcgcttcgctatccgcgaaggtggccgtaccgtcggcgccggcgtcgtggcaaagatcctcgactaagcacttcctgggacatgcctgtcgggcatgtccccattcaacgggcacgttgcccaatcgctcttttaaggaaatatcatgcagaaccagaagatccgtatccgcctgaaggctttcgactaccgcctgatcgaccagtcggccgccgaaatcgtggataccgccaagcgtaccggcgcaatcgtcaagggcccggtgcccctgccgacccgcatccagcgcttcgacatcctgcgttcgccgcacgtcaacaagaccagccgcgatcagtttgagatccgcacgcaccagcgcctgatggacatcgtcgacccgaccgacaagacggttgacgcgctgatgaagctcgacctgccggcaggcgtggacgtcgagatcaaggtgtaatcatgcttcgggccgcgcctgcggcctgctgcagcaaaacggcgaaccgtatggttcgccgtttttgttttcaaggcttgcatacagcagccttgctccccggattgctcccctgccgcgccagctacagttgcgcgatgagctgagcgatcgcggcggctgcccgaagcggcagcactgaattcacacaagcctagcccgctccgcgccgccgcaaggtctgcgcggggcactccccgaacgcgcgccggtattccgcgctgaaccgccccagatgggcaaagccccagcgcagcgcggccgcgctcactgacgacaccgacgcgacgttcagcaggtcgtgccgcacgcgctccagccgcaccgtgcgcaggtaggccatcggcccggtgccgcgatgctcgcggaagccggcgaacaggctgcgtacgctgacgccggcaacctcggccagcacggcgggggtcagctccgccgccgcgtttgcgtgaatatattcctccaccactttcacatggcgcggtgccagcggcttgccgtgctcgcgcactgcatccgacaggctgtgcggctgcgacgtcagcagcgtgccgatcaccagctgttccagctggcaggcggtcagcggatggcgtgcggtctcgggcgcggtcgccagcatcgcggcgagatagcgcatcagctcataccacgcgccgctgcgccaggccatgccgagcgcaaagcgcagcggccgctcggaccgccggcccagatgggccgcgcagatgcgttccagcgcactgcgttcgatgcgcacgatcaactggtcgttgtcggcgctccagcgcatggccagcgcatcgctgggcgtcagcaccgaagcgcagtcgggcgtggaaacgatgtgctggtcgccgcagcggatctcggcctgtccttgcagcggcatctgcaccagcaggaagtcgccgagcgggccggggtcgatggtgacgtcggcgccgtaggcgaggcggttgaacgagaccgcgccaagcggcgcatgatgcatgcgtgcctgcaagcgggtgccgcgtatctcgagccggtgcggcttgaacacgcgcccgacggcggcgcgcgtctcggccaggtcggtcgaggcgaacacgcaccgggcgggatcgccgagcagggcgctcgccagcggtccggcggcggggggcagctgcattgtctcgctcctctggcggggccgcggcgctgccggtgaccgtgcgcgccgctgattccggggccggcccggcatgacggccggggcacggtttcccacgcgatccactatagcggatggcctcgccgtctgcgctgcggcgttgaccgagcccgaagtttcctgcactaatcggatagccgctgcgcccagcggctagtttgctgcggtgcggagccaccattatggaagccagcacggcagtcccaccagacaccggaaagagaacgacaaggagcgcaggccatgggccagaccatccagatccagacccccgaaggcagtttcagcggttatctcgccaccccggcggcaggcaagggcccgggcatcgtgttgtgccaggagatcttcggcgtcaacgcgaccatgcggcaggtggcggactactacgccgaggagggctatacggtgctggtgcccgacctgttctggcgcatcgcgcccgggatcgagctgaccgaccgcggcgaggacttccagcgggcgctgggcctgtaccagcagttcgacgaagccgcgggcgtgcaggatgtgggcgccgcgcttgaagcgctgcgtgcgcggccggaatgcgtcggccagaccggcgtgctgggcttctgcctgggcggcaagctggcctacctggcggcctgccggctgcccgacgtggcctgtgcggtggcgtactacggcgtgggcatcgagcacgcgctgggcgaagccgccaacgtgcgcggccgcctggtgctgcatatcgccgagaaagacggattctgcccgccgcaggcgcaggctgcgatccgcgcagccctggccgggcgcgagaacatcgaggtctacgtctacgctggcgtcgaccatgcctttgcccgcaccggtggcgagcacttcgacaagccctcggcgctgatggcgcaccagcgctcgatcgcggcgctgcgcggtgaaatgggtccgcactacgatttctccgcgctgtgggacaagcactgcgaatacgaatttgccacccgcgatgtcgacgccaccatggcgacgatggtgccgcagccctatgtgaaccatatcccgaccatgaccggcggggtcggctacgcgcagctgcggcgtttctaccagcaccatttcgtgcacagcaatccgcccgacaccacgctgatcccgctgtcgcgcacggtcggggccacgcagatcgtcgacgagatgctgttctgcttcacgcatagctgcgagatcgactggatgctgcccggcgtgccgcccaccggcaagcgcgtggagatcccgctgatcgccatcgtcaagttccgcggcgacaagctgtaccacgagcatatctactgggaccaggccagcgtgctggtgcagatcggcaagctggatccggcgggtttgccggtcgcgggcgtggagaccgcgcgcaagctgctggacgagaccctgccgtcgaacacactgatggcgcgctggcagcagagcgaaggcaaataggctgcgcccgccgcatcgatccggaacgggcccgcagaggcccgcccgcaaccatcgccggctgttgccggcacaggagacaagcatgaaaggactgcagggcaaggtggccattgtcaccggcggcgccacgctgatcggcgccggcgtggcgcgggcctttgtcgaggccggcgcgcgcgtggcgatcttcgacatcgatgccgccaacggcgagcgcgtggccgcgcagctgggggcgaacgcgctcttcatcgccaccgacatcacgcgtgacgagcaggttcgcgatgccgtggcgcaggtggtgcagcgctttggcggcgtggactgcctggtcaacctggcctgcacctatctcgatgacggcttccgctcgaatcgtgccgactggctggcggcgctcgacgtcaacgtggtgtcgggcgtgatgctggcgcaggcggtgcacccgcatatgcgggcgcgcggcggcggtgcgatcgtcaatttcaccagcatctctgccaacgtggcgcagaccgggcgctggctctacccggtgtcgaaagccgccatcgcgcagctgacgcgcagcatggcgatggacctggcgccggaccgcatccgcgtcaacgcggtgtcgccaggctggacctggtgccggctgatggacgaggtcagcggcggcaaccgtgcccgcaccgatgcggtggccgcgccgttccacctgctgggccgcgtcggcgagcccgacgaggtggcccaggtggtgctcttcctctgttccgaccatgccagcttcgtcaccggtgccgactatgccgtcgacggcggctattccgccatggggccggagcagaacgtgcccgccatcggcaagctggccggctgaacgccgccgaacgatccttcaggagaaaacgtcatgagccaacgcatcgccatcgtcggagctggccagtcgggcctgcaaatggccctcgggctgcaagccaacggctaccgggtcacgctgctgtccaaccggacccccgagcagatccgcggcgggaaagtcatgtccagccagtgcatgttcgaccgcgcgctgcaggccgagcgcgagctcgggctgaactggtgggacgatgcctgcccgccggtggagggcatcggcctggccgtgccgcatcccgagcaggccagtgcccgcgcgatcgactgggccgcgccgctggaccgcccggcacaggcggtggaccagcgcctgaagatgcccgcgtggatggaggccttcgttgcacgcggcggcgacctgcgcatcgccgatgtcggcccggatgaactggaggacctgacccgcgagcatgacctggtgctgctggcggccggcaagggcgagatcgtcagccgcttcgagcgcgatgcctcccgcagcccgttcgacaagccgcagcgcgcgctggcgctgacatatgtgaccggcatgcagccgcgcacgccgttctcgcgggtttgcttcaacctgatcccgggcgtgggtgaatacttcgtcttccccgcgctgacgctgtcggggccgtgcgagatcatggtgttcgaaggcatcccgggcggcccgatggaccgttgggccgaggcgcgcacgccggcgcagcacctggcggaaagccagcgcatcctgcagacctacctgccatgggaggccgagcgctgtgagcgggtcgcgctgaccgacgacaacggcatccttgccggacgcttcgcgccaacggtgcgcaagccggtgctgacgctgccgtccgggcggctggtgttcggcatggccgatgccgtggtggtcaacgacccgatcacggggcagggttcgaacaacgcagccaaatgctgcaaggtctatctcgatgcgatcctggcacgcggcgaccagcccttcgaccaggactggatggagcgcaccttcgaccagtactggcagtacgcgggcgacgtggtggcgtggaccaactcgctgctgaccccgccgccgccgcatatcctggcgctgctgggcgccgcggggcaggcgccggcactggccgcgcgcatcgccaacggtttcgacaatccgccggactatttcccgtggtggctggatccacaggcttgccaccagctgatcaaccagtacgtcgccgaggccgcctgacatgcacgccgccacgcccgccacttccgtccatgatccccgcgaactgcgccgggtttgcggccgctatgccaccggcgtggccgtcatcggcgcctgcggggcgcagggccggcccgtcggcttgacggtgaactcgtttgcctcgctgtcgctggcgccgccgctgatcctgtggagcctggcgctgcactcgccgaatgcgggcctgttcgtgcccggcgcgcctttcggcgtcagcatcctgcgcgccggccatggcgaactggcgcgccgcttcgccacgccggtggcggacaagttcgcgggcgtcgcccacgggcgctgcgagcgcggcgtgccctacctggacgaagcactggcgaccctggcctgccgcgtggagcgggccgacccggtaggcgatcatctgctgatcgtcggcgccgtcgaggcatacgaggcaggggagggcgaaccgctggtattctatggcggcgatttcgtgcgcctcgccgcctgagcaaccatctcccggatgcgcttcgcggcacttcaactaccgcccgtcgcctccacaccacaccccaagtcacgcaagcgccactactgcggcacgcctgcctacaacactgcaggcgaatccgcaattcatattgccctttccaaaccgctgcgatatagtgtaaggctacccgtttcctcgggtagtgggctggccactttggccgcgcgcagtcttctttagcgcaagcccacagcaaacacagttttcgtgtatcaatcagccccggccaatcgcagctgggaatggagcaaaccatgagccttggccttgtaggtcgcaaggttggcatgacccgtattttcacggacgacggtgaagcaattcccgttaccgtggtcgaggtcggcgacaaccgcgtgacgcaaatcaagacggacgagaccgacggttataccgcggttcaagtcaccttcggcgcacgacgcgcaagccgcgttaccaagccgctggcgggtcatctcgccaaagccggcgtggaagccggcgaaatcatccgcgaattccgtatcgatgcagccaaggctgccgaactgcaagctggcggttcgctgtcggtcgacctgttcgaagtcggtcagaagatcgacgtgcagggcgtgaccatcggtaagggctacgccggtaccatcaagcgctatcacttcgcctccggccgtgccacccacggtaactcgcgctcgcacaacgtgccgggctcgatcggtatggcgcaggatccgggccgcgtgttcccgggcaagcgcatgaccggtcacctgggcgatgtcacccgcaccgtgcagaacctggaaatcgccaagatcgacgcagagcgcaagctgctgctggtcaagggcgccatccccggctccaagaacggcaaggtcatcgttaccccggccgtcaaggccaaagccaaagcttaaggagcgcatgtaatggaactcaagctcctccaggacaatggccagatcggcgcgggcgttgacgcttcgcccgaagtgttcggccgtgactacaacgaagccctcgttcaccagatcgtcgtcgcttaccaggccaacgctcgcagcggtaaccgtaagcagaaggatcgtgaagaggtcaagcacacgaccaagaagccgtggcgccagaagggtacgggccgtgctcgtgccggtatgtcttcctcgccgctgtggcgcgggggcggccgtatcttcccgaattcgccggaagagaacttcacccagaaggtcaacaagaagatgttccgtgccggcatgcgctcgatttactcgcagctcgcacgtgaaggtcgtatcaacgtggtggacggtttcactgtcgacgcgcccaagaccaagctcttggccgacaagttcaaggccatgggcctggactcggtgctgatcatcaccgacagcctcgacgaaaacctctacctggcttcgcgcaacctgccgcacgtggcagttgtcgagccgcgccaggctgatccgctgtcgctcgtgcactacaagaaggtgctggtgaccaaggcagccgtcgcgcagatcgaggagttgctgaaatgacgcaagtagccaagaacgatcatcgtttgatgcaggtgctgctcgcgccggtggtttccgaaaaggcaaccctggtcgccgacaagaatgaacaggtcgtgttcgaagtggcccgcgatgccaacaaggcagaagtgaaggccgccgtcgaactgctgttcaaggtcgaggtgcagtccgttcagatcctgaaccagaagggcaagcagaagcgttttggccgtttcatggggcgtcgcaaccacgtgaagaaggcctacgtttcgctgaagccgggtcaggaaatcaattttgaagcggaggccaagtaatcatggcactcgtcaagaccaagccgacttccccgggtcgtcgctcgatggtgaaggtggtcaacaaggaccttcacaagggcgccccgcacgctccgctgctggaaaagcaattccagaagtcgggccgtaacaacaacggtcatatcaccacccgccacaagggcggtggtcataagcaccactaccgcgtggtcgacttcaagcgcaacgacaaggacggcatccccgcccgcgtcgagcgcctggaatacgatccgaaccgcagcgccaatatcgcgctggtgctgttcgccgacggcgagcgccgctacatcatcgccaccaagggcatggttgccggccaaccgctgatgaacggctcggaagcgccgatcaaggccggtaacaacttgccgatccgcaacattccggtcggtaccacgatcaacaacgtggaaatgctgcctggcaagggttcgcagatcgcacgtgccgccggcggttccgccgtgctgctggctcgtgaaggcctgtacgcccaggttcgcctgcgctccggtgaagtgcgccgcgtgcacatcgagtgccgcgccaccatcggtgaagtgggcaacgaagagcacagcctgcgcgtcatcggcaaggccggtgcgacccgctggcgcggtatccgcccgacggtccgtggtgtcgtgatgaacccggtcgaccacccgcacggtggtggtgaaggcaagaccgctgctggtcgcgatccggtttcgccgtggggtaccccggccaagggttaccgtacccgcagcaacaagcgcacggacagcatgatcgtccagaagcgccacaagcgttaatcggtaggtaggagctaaagatatgactcgttccgctaaaaagggtccgttctgcgacgcccacctgctgaagaaggtggaagtcgcatcgagcggcaaggacaagaagcccatcaagacttggtcgcgtcgctcgaccattctgccggagttcattggcctgacgatcgccgttcacaacggccgtcaacacgtgccggtgtacgttacggaaaacatggttggccacaagctcggtgaatttgcgattacccgcacgttcaagggccacgcggctgacaagaaagcgaagaggtaaggtgccatcatggaagtgaaagcgattcatcgcggtgcccgcatctccgcccagaagacgcgcctggtcgctgaccagatccgtggtctgccgatcgagcgcgcgctcaatgtcctgacgttcagcccgaaaaaggctgccgggatcgtgaagaaggtggtcgaatcggccatcgccaacgctgagcacaacgaaggcgccgacatcgacgaactgaaggtcaaatcgatcttcgtcgacaaggcaacctcgctcaagcgcttcaccgcacgggcgaagggccgcggcaaccgcatcgagaaacaaacctgtcacatcactgtgacgctcggcaactaaggagtcacgatgggacagaagattcatccgactggcttccgcctggctgtcagccgtaactgggcttcgcgctggtacgccagcaacacgaagttcgccggcatgctgaaggaagacattgaagttcgagacttcctgaagaagaagctgaagaacgcatcggttggccgcgtcgtgatcgagcgccccgcccgcaatgcacgcatcaccatttacagctcgcgtccgggcgtggtgatcggcaaaaagggtgaggatatcgaactgctcaaggctgaactgcagcgtcgcatgggcgtgcccgtgcacgtgaacatcgaggaaatccgcaagccggaaaccgatgctcagctgatcgccgattcgatcacccagcagctcgagcgccgcatcatgttccgccgcgccatgaagcgcgccatgcagaacgcgatgcgcctgggcgcccagggtatcaagatcatgagcgccggccgtctgaacggtatcgaaatcgcacgtaccgagtggtaccgcgaaggccgtgtgcccctgcacaccctgcgcgccgacatcgactacggcttctccgaagcagaaaccacctacggcatcatcggtgtcaaggtgtgggtctacaagggtgatcacctcggccgcaacgacgcgccggtggtggaagagccgcaggacgaccgtcgtcgtcgcccgggtcgtccggaaggccgccgccgtgaaggcgaaggccgtccgggtggcaaccgccgcggcggtgccggtgccggtcgccgcgctgcgcctggcgcagatgcgaagagtggagaataacgatgctgcaacctaagcgcagaaaataccgcaaggagcagaaaggccgcaacacgggtaaggctacccgtggtaacgccgtgtctttcggcgaattcggcctgaaggccatgggccgtggccgcctgaccgctcgtcagatcgagtcggcacgtcgtgcgatgacccgccacatcaagcgtggcggccgcatctggatccggattttcccggacaagccgatctcgaagaagcctgccgaagtccgtatgggtaacggtaagggcaatccggagtactacgtggctgaaatccagccgggtaagatgctgtacgaaatggatggcgtgagcgaagacctggcacgtgaggcgttccgcctcgcggccgccaagctgccgatcgccaccaatttcgtggtgcgccaggtcgggacgtaaggagagcagggatgaaagcatccgaacttcgcggcaaggacgccgccgggctgaaccaggagctctccgagctgctgaaggcccaatttagcctgcgcatgcaaaaggcgacccaacagctgcagaacaccagccagctgaagaaggttcgcaaggacatcgcgcgtgtgcaaaccgtgctgactcaaaaggcaaacgcgaaatgactgaagctgcacaaacggaaaagtcgcttcgccgtaccctggtcggccgtgtcgtgagcgacaagatggacaagaccgttacggtcttggtggaaaaccgcgtcaagcatcctctgtacggcaagtacgtgctgcgttcgaagaagtaccacgcacacgacgaagccaaccagtacaaggaaggcgacaaggtcgagatccaggaaggccgtccgctgtcgcggaccaagtcctgggtggtttcccggctggtagaggctgcacgcgtcatctaagaacaacacgttcttagcttgacttgcaagtccaggattatgtagctataatcctggacttccgctttgttgcgttcgcctttgcattaccacccgggcgggcctgtgaagcgagccaggaccgagcgccctcaacaaatagttgagatcgcgtggttcctaccgacttcaaagttgatcaacccatacggagctggcgcaatgccggagccgacgggaccaagactgaccgatgggcgctttttgcacctgacggattaagttgggaagacaaacaccatgattcagacagaaagccggctcgaagtagccgataacactggtgcgcgcgaagtgctgtgcatcaaggtgctgggtggctccaagcgccgctacgcaagcgttggcgacatcatcaaggtgaccgtcaaggacgcagcgccgcgcggtcgcgtgaagaagggcgacatctacaacgccgtcgtcgtgcgtaccgccaagggcgtgcgccgcgctgacggttcgctgatcaagttcgacggcaacgccgccgtcctgctgaacaacaagctcgagccgatcggcacccgtatcttcgggccggtgactcgtgaactccgtaccgagcgcttcatgaagatcgtgtcgctcgctccggaagtgctgtaaggagccgccatgaacaagattcgcaaaggcgacgaagtcattgtgctgaccggcaaggacaagggcaagcgcggtaccgtgcaagccgtcctgggtgacaaggttgcggtgcaaggcgtgaacatcgccaagaagcatgcccgcccgaacccgatgctgggcactaccggtggtgtggtcgacaaggtcatgcccctgcatatttccaacgttgcgctcgtggatgccaatggcaagccgtcgcgcgtcggcatcaaggtggaagacggcaagcgcgtgcgcgtgctgaagaccaccggcgccgtcgtggcagcttgattctgggcacgtataggagttgagcatggcagcacgtctgcaagagttttacaaagaacaggttgtgccgaagctgatcgaacagttcggctacaagtcggtcatggaagtgccgcgcatcaccaagatcaccctgaacatgggtcttggcgaagccatcaatgacaagaagatcattgagaacgccgtcggcgacctgaccaagatcgccggtcagaagccggtcgtgacgaaggccaagaaggctatcgccggcttcaagatccgtcagggctaccccatcggtgcgatggtgaccctgcgcggcgagcgcatgttcgaattcctcgatcgtttcgttaccgtggccctgccgcgcgtgcgtgacttccgtggtgtgtcgggccggtcgttcgacggtcgtggcaactacaacatcggtgtgaaagagcagatcattttccccgaaatcgagtacgacaagatcgacgcactgcgtggtctgaacatcagcatcacgacgacggcaaagaacgacgaggaagccaaggcactcctcggtgcgttcaagttcccgttccgcaattaaggggtaaccgtggctaaactggctctgattgaacgtgagaagaagcgcgccaagctggtggcgaagtatgccgccaagcgcgccaacctcaaggccattatcgatgaccaagagaagtcggaagaagagcgttacagcgcgcgtctcgagctgcaacagctcccgcgcaacgcgaacccgactcgccagcgtaaccgctgcgcgatcaccggtcgtccccgcggtaccttccgcaagtttggcctggcgcgtaacaagatccgcgaaatcgccttcaagggcgaaatcccgggtctgacgaaagccagctggtaattacgcacaggctacaggagaaacagtatgagcatgagcgatcctatcgccgatatgctgacgcgcatccgcaacgcccagggcgtgcagaaagcgtcggttgtcatgccgtcgtcgaagctgaaagtggcaatcgccaaggtcctgaaggacgaaggctacatcgacgactacgccgtccaggaagatggcggcaaggcacaactgagcatcggtctcaagtactacgccggccgtccggtcatcgagcgcattgagcgcgtctcgaagcccggcctgcgcgtgtacaagggccgcagcgacatcccgcaagtgatgaacggcctgggtgtggcgatcatttcgaccccgcagggtctgatgaccgaccgcaaggctcgcgccactggcgtgggcggcgaagttctctgctacgtcgcttaaggagagaaccatgtcccgtgtaggtaaggctcccatcgcgctccccaagggcgcggaagtgaacgtggcggctggcgtgctctccgtaaagggcccgctcggtacgctgtcgcagccgattcacagcctggtcaaggtcaatgtcgagaacgacacgctgaccttcagcccggctgacgaatcgcgtgaagcaaacgctctgcagggcaccatgcgtgctctggtggccaacatggtcaagggcgtaaccaccggtttcgagcgcaagctgaacctcgtcggcgtgggctatcgtgcccagctgcaaggcgctgcgctgaagctccagcttggtttctcgcacgacgtgatccatgagatgccggaaggcgtgaaggcggaaacgccgacgcagaccgagatcatcatcaagggtgcggacaagcagaaagtcggtcaggttgccgcggaagtccgcgcgtaccgcccgcctgagccctacaagggcaagggtgtgcgttactcggacgagcgcgtcatcctgaaggaaaccaagaagaagtaaggggtgcaatgatgaacaagaaagacgctcgtttgcgccgtgcacgtcagacccgcgccaagatcgcggagatgaaagtcaatcgtctgaccgtgttccgtacgaattcgcatatttacgcccaggttttctcggagtgcggcaccaaggtgctggcttccgcgtcgaccgccgaggtggaagtgcgcaaggaactggatggcaagggcgctaccgccgctgccgccaccgtggttggcaagcgcatcgccgagaaggcgaaggctgccggcgtggaaactgtcgcgttcgatcgcgccggcttccgtttccatggccgcgtcaaggccctggcagacgccgcccgcgaagccggcctgaagttctaagcgcatagagagagatacgtcatggcaaagatgcaagcaaaagtccaacaggacgaacgcgacgacggcctccgcgagaagatgatctcggtcaaccgcgtcaccaaggtggtgaagggtggccggattctcggtttcgctgcgctgaccgtggttggtgacggcgatggccgcatcggcatgggcaagggcaaggctaaggaagtgccggttgctgttcagaaggcaatggacgaagcccgtcgcaagatggtcaaggtctcgctgaagaacggcacgctgcaacatgaagtcgttggcaagcacggcgccgccaaggtgctgatgatgcccgccaaggaaggtaccggcgtgatcgccggcggcccgatgcgcgcgatcttcgaagtgatgggcgtcaccaacgtggtgaccaagtcgcacggctccaccaacccgtacaacatggttcgtgccacgctggacggccttcagaagatgagcacgccgggcgaaatcgccgcaaagcgtggcaagtcggtcgaagacatcctgggttaaggtgaacgcaatgtcgcagaaaaccgtaaaagtgcaactcgtgcgcagcctgatcggcacgcgcgaggatcatcgcgccactgttcgtggcctgggcctgcgccgcatcaactcggtgtcggagctgcaggacacgcccgctgtgcgcggcatgatcaacaaggtctcgtacctggtcaaggttctggcctgataccgggaactcggagagcaagatgcaactgaacaacctgaaaccggccgccggttcgaagcacgccaagcgtcgcgtcggtcgcggtatcggctccggccttggcaagactgccggtcgcggtcacaagggtcagaagtcgcgttcgggcggcttccacaaggtgggcttcgaaggcggtcaaatgccgctgtatcgtcgcctgcccaagcgcggcttcacctcgctgaccaaggcgttcaacgccgaagtcacgctgcgtgacatcgagcgcctggaagcggccgaagtcgacctgctggtcctgaagcaagctggcctggtgggcgagctggtcaagagcgccaaggtcatcaaggctggcgaactgacccgcaaggtgacgatcaagggtctgggcgccaccgctggcgccaaggccgcgatcgaagccgccggcggccagatcgcagcctgacaggcatttatcgcagcataggcagttatagtcggagcatcgtttggccacggcgaaacccaatgcaagcgcgcaagccaggaacacggcgaagtacggcgacctcaagcgccggctgatgttcctggtgctggccctgatcgtgtaccgcatcggcgctcatattccggtgcccggtatcgatccggagcagcttgcgaagcttttccagagtcagtcgggtggcatcctcgggatgttcaacctgttctcgggcggggcgctgtcgcgctttaccgtcttcgcgctcggcatcatgccgtacatctcggcgtcgatcatcatgcagttgctgacgatcgtgctgccgcagctggaggcgctgaagaaggaagggcaggcagggcaacgcaagatcacgcagtacacgcgctacggcaccgtggtcctggccacgttccaggcgctgtcgattgcggtggcgctggagtcgcagcctgggctggtgctggatccgggcctgatgttccgggccacggcagtgattacgctggtgaccggcacgatgttcctgatgtggctgggtgagcagatcaccgagcgtggtctgggcaacggcatctcgatcatcatcttcggcggtatcgcggcgggcctgcccaacgcgatcggcggactgttcgaactggtccgcacgggttccatgagcatcatcgcggcgatcttcatcgtggcgatcgtgatcggtgtgaccttcgccgtggtgttcgtcgagcgaggccagcgcaagatcctggtgaactatgccaagcgtcaggtcggcaacaaggtgtacggcggccagtcgtcgcacctgccgctgaagctgaacatggcaggggtgattccgccgatcttcgcatcgtcgatcatcctgttcccggcgacgatcgcgggctggttcacgtccgatgcgacgggctcggttggcgggttcatcaaggacctggctgccacgctgtcgccgggccagccggtctacatcctgctgtacgctgctgcgattgtatttttctgcttcttctacacggccctggtgtacaacagccgtgaagtggcagacaacctgaagaaaagcggtgccttcattccgggcattcgtccaggcgagcagacgacgcgctatatcgacaagattctggtgcgcctgacgctggctggtgcggtctatatcacactggtctgcctgttgccggaattcctggtgctgcggtggaacgttccgttctactttggcggaacctcgctgctgatcatcgtggtcgtcacgatggacttcatggctcaggttcagtcttacgtgatgtcgcagcaatatgagtcgctgctgaagaaggcgaatttcaagggcaatctgaccttgcgctgacttcggatcggtacaggctaggtatggcaaaagacgacgtcatccagatgcagggggaggtcctggaaaaccttcccaatgcgacgttccgggtcaagttggaaaatggccatgtagtactgggccatatctccggcaagatgcgaatgaactacatccggattcttccgggtgacaaggtgacggtcgagctgaccccatatgatctgtcgcgcgcacgaatcgtcttccggacgaagtgagcgaacaggaattgaaggaagaggaaaattatgaaagtgctggcttctgttaagcgcatttgccgcaactgcaaaatcatcaagcgcaacggtgtcgtgcgcgtgatctgctcgtcggatccccgccacaagcaacgccaaggctaatcggaaagaggattgacgaatggcacgtatcgcaggggttaacatcccgaaccacaagcacaccgaaatcggcctgacggccatttatggtgtcggccgctcgcgcgctcgcaagatttgcgaggccaccggtgtaccgtttgacaagaaggtcaaggatctgaccgacgccgacctggaaaagcttcgtgacgaagtgggcaaggtcacggtcgagggtgacctgcgtcgtgaaaccacgatgaacatcaagcgtctgatggaccttggttgctatcgtggcatgcgtcaccgcaagggcctgcccatgcgcggtcagcgtacccggaccaatgcccgcacccgcaagggtccgcgcaaggccggcgtggctctgaagaagtaaagccgaaggcagaggaagaaactaatggcaaaaggtccgaataacgccgctcgcgcgcgtaaaaaggtcaagaagaacgttgccgacggcattgcgcacgtccacgcctcgttcaacaacaccatcatcacgatcaccgaccgccagggcaacgccctgtcgtgggcgaccgccggtggccagggcttcaagggttcgcgcaagtcgaccccgttcgctgcccaggttgctgccgagaacgccggtcgcgtggcgcaagaccagggcatcaagaacctggaagtgcgcatcaagggccccggcccgggtcgtgaatcggctgtccgcgcgctgaacgcgctgggcatcaagatcgcgatcatcgaagacgtcacgccgattccgcacaacggctgccgtccgccgaagcgccgccgcatctgagcgttggtgtgtccgggcccggtgggtttacctgccggtttcggatatggtagtatcgcgcgttgacctgctgcattttaatgcggcaggttttcgttttgcgtcgagggagtgtctcttgcggcacattcccatgccggcgcactgtaaatgcttgcagcgtcgtacccggcaacggggcgcgcttaataagcccaccgtccgtcacggtctccccgggtgcagaattgcactgcggaagtactgcgttgacggactcgcggcgcgtcttgaaggcgtcgcgatcgatcaaaggaagacaacgtggcacgttataccggcccgaaggccaaactttcccgccgtgaaggcaccgacctgttcctgaagagcgcccgtcgctcgctcgccgacaagtgcaagctggacagcaagccgggccagcacggccgcacctcgggtgcacgcacctccgactacggcaaccagctgcgtgaaaagcagaaggtcaagcgcatctatggtgtgctcgagcgccagttccgccgctacttcgccgaagccgaccgccgcaagggcaacaccggcgaaaacctgctgcaactgctggaatcgcgcctggacaacgttgtgtaccgcatgggctttggctcgacccgcgctgaagcgcgccagctggtgtcgcacaaggcgatcctggtgaacggtcagaccctgaacgtgccgtcggcccagatcaagtctggcgacgtcgtcaccatccgcgaacagtcgaagaagcaagtccgtatcgctgaagcgctgtcgctggccgagcagtcgggcttcccgacctgggtggcggtggattcgaagaagttcgaaggtaccttcaagcaagtgccggatcgcgccgatatctcgggcgacatcaacgaaagcctgatcgtcgaactgtactcgcgttaatcacgcgagcggaacggcccagagcttgcgttcgccgcaaagcttcccttccagcccgacgcgctgtacgcgcggtcgggcttcgcccatctcgcgatgggattttcaggttccaaacgtcagccttatcggtgtaacgagccgagggtattgaaaaggacaacctaatgcaaacagcactcctcaagccaaaaatcatcgccgtcgagcctctgggcgaccatcacgccaaagtcgtgatggagccgttcgagcgcggctacggccatacgctcggtaacgccctgcgtcgcgtgctgctgtcgtcgatggtcggctatgcaccgaccgaagtcacgatcgctggggtggtccacgagtattccaccatcgacggcgtgcaggaagacgtcgtcaacctgctgctcaatctgaagggcgtggtgttcaagctgcacaaccgcgacgaagtcacggtgtcgctgcgcaaggatggcgaaggcgtggtcacggctgccgatatcgagctgccgcacgacgtcgagatcatcaacccgaaccacgtgatcgcccatctgtccgccggcggcaagctggacatgcagatcaaggtcgagcaaggccgcggctatgtgccgggcaacgtgcgcaagttcggcgacgagtcgggcaaggtcatcggccgcatcgtgctggacgcttcgttctcgccggtgcgccgcgtctcgtacgcggttgaatccgctcgcgtggaacagcgtaccgacctggacaagctggtgatgaacatcgaaaccgacggcgtgatctcgcccgaggaagcgatccgccagtcggcccgcatcctggtcgaccagctgtccgtgttcgccgcgctggaaggcaccgagtcggcagccgaggctgcatcgagccgcacgccgcagatcgatccgatcctgctgcgcccggtcgacgacctggagctgacggtgcgttcggccaactgcctgaaggccgagaacatctactacatcggcgacctgatccagcgtaccgagaacgaactgctcaagaccccgaacctgggtcgcaagtcgctcaacgagatcaaggaagtcctcgcatcgcgtggcctgacccttggcatgaagctcgagaactggccgcccgcaggtctggagaagtaattgtggcgcggggcattggtcccgcaccgcggtaaccgccctggcttcgtgccaggactcgtatgactaccggcccgcgtccagccgcatcggacgatagaagagctggtcaaacacttaactgaaaggaatcatcatgcgtcaccgtcatggtctgcggaaactgaaccgcacctcgtcgcaccgtctcgcgatgctgcgcaacatgtccaactcgctgttccagcacgagctgatcaagaccaccgtgcccaaggccaaggaactgcgcaaggttgtcgagccgctgatcacgctggccaagaaggacaccgttgccaaccgccgcctggctttcgcccgtctgcgcgaccgcgacatggtcaccaagctgttcaccgaactgggcccgcgctacgccacccgtccgggcggctacacccgcatcctgaagttcggtttccgtcagggtgacaatgcgccgatggcgctggtcgaactggtggatcgtccggaaatcaccgaagccccggctgaagaagccgcggaataaggtagtttcccgcccgccgctgcggcgacgggtacgggcacaccgcttacaatcgagccaggcatctgcctggctcttttgtttttgggccgccgccgtgcctgccgcaaggagatgtcgatgcaaagccatgccagccagccggatgccggcgccccgggcgatccggccgaggtgatcgtcgtgatcaccaatactccagatgccgagaccgcggcgcacctgtcgcaggtagtgctggaggcgcgcgccgccgcctgcgtgaaccgcctggcgccggtcgagtccgagtactggtggcagggcaagctggagcgcgcgcaggagtggccgctgctgatcaagaccacgcgtgcacgttacgctgcgctggaggccgtgatccggcaacatcacccctacgacgtgccggaactcatagcgtggccggtgacggccggttacgcgccgtacctggcctgggtcagcagcgagaccgcctcagggccggcaaagtaggggcaaccgcgcccgcagcgcagcagcaggtacgccgcccccccagttcaagacagacaggaaacagcgagatgacaatcggtttggcacttccggagcgcgcgcgcgggcaggtctgggcgcggcatattgccgcagcgctgctggcggcattggcctgggtgtgcctggcgggcggcgcgcatgccgccaccgaagacgacttcctgccgccggagcaggccttccgcttcgccgcgagccagcttgacgacaagactgtcgaggtgcgcttcgaggttgcccccggctactacatgtaccgcgagcgcttcgcctttgccgcgcaacccgccgacgtgaagctgggaatgccggcgtatccgccgggcaaggtcaagttcgacgagaccttcggcaaggagatggagacctaccgcgacagcgtggtcatccgcgtgccggtggaggcggcgccggccgacggcaagtggtcgctgacggtcacctcgcagggctgcgccgacaagggcctgtgctatccgccgatggagagcgtgtacaaggtcggcggcagcgggctggccgacctgttcggcaagcgcgggcgctcggatgcgccggcggccgtgcctgcccctgcgccagccgcccccgcggtgctgcgcgccgacgacagcgaccgcatcgccggcgcgctggcgagccgcaacctggccctgatcgccgcactgttcttcggcctgggcctgctgctgacgttcactccatgcgtgctgccgatggtgccgatcctgtcctcgatcgtggtgggcgagcacgtcacgcgcggccgtgcgctggtggtgtcgctggcctacgtgctgggcatggcggtggtgtacaccgcggtcggcgtggctgccgggctgctgggcgagggcctgtcggccgcgctgcagacaccgtgggtgctgggcctgttcgcagcgctgatggtggccctggcgctgtcgatgttcgggctgtacgagctgcaactgccgcagcgctggcagacccgcctgaccgaatcgtcgcaccgccgccagggcggccaggtggcgggtgcggcggcaatgggcgcgatctcggcgctgatcgtcgggccctgcgtcaccgcgccgctggccggggcgctggcctatatcgcgcaatcccgcgacgccgtgatcggcggcgcggcgctgttcgccatggcgctcggcatgggcgtgccgctggtgctggtgggcgtgggcgcgggcaacctgctgccgcgggccgggcgctggatggaggtcaccaagcgcttcttcggcttcctgctgctgggcgtggcgctgtggatgctggggccggtgctgccggcctgggcctcgatgctggcgctggcggcgctgctgctggtggcggcggtgttcctgggcgcctttgacggcctgggcccggatccgcgcaacctggcgcgggtgggcaagggcgtgggcgtgctgtttgcgatcgcagcggcgatcgtgctgattggcgtggcctcgggcgggcgcgatccgctgcagccgctgtcgcacctgagcgtggcacgcggtggcgcggaagccgctgccggcgcacaggcggtgcgcttcgagcgcgtgcgcagcgtggccgagctcgatgcccgcgtggcgcaggccgccgccgcaggcaagccggtgctgctggatttctacgccgactggtgcgtcagctgcaaggaaatggagcgcatgaccttcgtcgatccgcgcgtgcgcgcgcggctgtccgagatcgtgctgctgcaggcggacgtgaccgccaacaatgccgacgacaaggcgctgctcaagcgcttcggcctgttcgggccgcccggcatcatcctgttcgggcctgacgggcgcgagcgcccggtgcgcgtgatcggctaccagtcggccaaccgcttcctggaaagcctggagcgggccttcggcacgcgtaccagcacctgacgcgtacctagtgctgcgcggtggctaccgttccagccgccgccccagcgcccacagcgcggccagccccagcgccacggcgcccatcaggccgatcgaccaccagaacccgtgcggctcgcgcagccagggcatgcggtcgaagttcatgccgaagacaccggtgatcagcgtcagcggcatgaacagcgccgtgatcagcgtcagcgcgcgcatggtgcggttggtccggtgcgccaccgcggagaagtggatctgcaccgccgactcgatcgaatcctccagccggcgcgcgtgcgccagcacgcgctggatatgctccatcacgtcgttgatgcgcaccagcagcacctcgtcacgccccggcgcattggccgggccgccgggctggtcgctgctgaagcggttgtcgagcaggctgtcgcggaattcctgcagcgcgtcgcgttgctcttcgctcaggtgctccagcttgcgcagctggatgcgggcatccagcagtccctcccagcttgagaagctgcggcgcgaattgagcagcgcgcgctgccagcggtcgagctggcgcgtcagcggcgcgcgcagttccaggtaacggtcgaccatcgcattgagcaggcgcagcatcaggtcctcgggccggctgggcgggcgcacgccgtgcagcagcggctggccattgccacgcacgggcgtggcctgcgggcgtggtgcctggcatagctcgatcagacgctggcgcacctggtcaacggtgcgcgattgccccgagcgcaccgtgaccagcaccgtgtcgaacacgaaaaacgtgaccggctgggtgtcgatcttggccagtgccgggaggaagccgggcggatagcgcttctggcgggcggcggactcggcagcggacggcttcgccgttccggccacagggtcctgcggctcggcctcggcgatggcgcggctggtctcgaaggtgagcttgcggaagatcaccatgtcgtacgcattggtcgtgtcgaaatacgacggatgcgcggcattggtggcgtcggccaggtgcaggtccaggatcggcgcgccggcaagctggcgcacgctctcgcgccagacatccggcgcggcggtgacttcttctgtggagaaatccgcccagacgaacagcgacgcggcattgctgccgaggaagttgcccgcctcggtgagcgaggcgagcgggtgtacctggctggccgagaagcctagcagttccataggcgctctgtcggttagccgctcaggccgtcagcagccgcgcggcgtcgcgcgcgaaataggtcaggatgccgtcggcgccggcgcggcggaaggccagcagcgattccatcatcaccttgtcgtggtccagccagccgttctgcgcggcggccttgagcatcgcgtattcgccgctgacctggtagacgtaggtggggaagcggaactcgtccttcacgcggcgcacgatgtccaggtacggcatgccgggcttgaccatcaccatgtcggcgccttccaggatgtcctgtgccacctcgcgcagggcctcgtcggtattggccggatccatctggtaggtcatcttgttgcccttgcccaggttggcggccgagcccaccgcgtcgcggaaggggccgtagaacgccgacgcatacttggccgagtacgccatgatgcgcgtatggatatggccgttgtcttccagcgcggtgcgcaccgcgccgatgcggccatccatcatgtcggacggggccacgatgtcgacaccggcttcggcctgtgccaatgcctggcgcaccaggatctcgacggtcacatcgttgatgacgtagccgttgtcgtccagcacgccgtcctggccgtggctggtgtacgggtcgagcgccacgtcgcagagcacgccgagctcggggaagcggtccttgagcgcgcgcacggcacgtggcaccaggccctcggggttggtggcctcgatgccgtccggcgtcttcagcgacgggtcgatcaccgggaacagcgcgatcaccgggatgcccagcttgacgcagtcttcggccaccggcatcagcaggtcgaccgacacgcgctcgacgcccggcatcgacgccaccgcctggcgctggttctggccgtcaaggatgaagacggggtagatcaggttgtccggcgacaggcgatgctcgcgcatcatgcggcgggagaaatcatcgcggcgcatgcggcgcgggcggtattcggggaaggtggacatggcgggcttcttgactgtagggctggacaggaaagcgggccggcaagcacggcgcgcgcggcaaagcgcggtccaaagccgctggccgaagaaaaactaaacttttgagcgtgcccgctatcatactcgcggacactttgcgttgcgccctgcgtggcgcggtgtcccccgctactcctccctgagcgggtacccgccccagcggcgggaaagtttgtccccgttgcttgcagcggggcttttttttgcgtgctgacctggtgattactctgcgggatcggcagcaggcggctcgctcttctccgctgcggaccgggcttcggccttctgcgcttccggcaggttgagccagccggcgatcacgccctgcgcctcttcgatgccgcggcgcttcaggctggagaagagctgtgccgtcatcggcaccggtgtttccatctgctcggcgtagccctgcagcatcttgcgggtctcgcgcagcgccttggcgttgtcgctgttggtcagcttgtcggccttggtcagcagcacgtggatggggcgccccgtcggcaggaaccactccaccatctggcaatcgagatccgtgaacggacggcgcgcgtccatcatcaggatcaggccggacagttgctggcgcgtctgcacatagtcgctcagcagcccctgccagtggtacttggccgagcccgagacctcggcatagccgtagccgggcaggtcgaccaggaaggcgagcgggtcgggcgccttgaccggcgccaccgagaaatagttgatatgctgcgtgcgcccgggggtgcgcgacgagaacgccagccgcttctggttgcacaggatgttgatggccgtggacttgccggcgttggagcggccggcgaacgccacctccggcacggccgtggcgggcaggtcgcgcaggtggttcacggtgatgaagaagcgggcctggtgaagaagggacatgcgctagagcggtggggcgggccgcggaggctgtgcgcattgcgcatgccggggccggggtctcgccagggtgggatggctggcggcctgggccgcccgccggggttgatctggcgcagcccgaaaggggcatgacaaggcgcaaggcatcaatccggcacataacttattgtacaatacgccggtttacggtctcctgaacgggtgacgcgtggcatccatggccgcgtgcctcggctgccgtcgtccgggcgggaagcctagtgtgtcgttccatcgtgggcagggcctttgccccgcattgcgcgttgcaccggagggtgcggcggctgcgggagcgggctggcggggtctgccgccacggccagcgctttgcggatcggtcagccgcgcgcgggtcgccacgataccagcctttgcaccggcgcgtcctcaccgccggcaaagcgccggggcggcacgcatcacggtatccaaaacaattcagagaaggtgtgcgaatgaaccgcattgcgaagattctgggtgtcctggctttggccgttcctgccgccgccctttccggaatggcatctgccgcagagcaggccgccgcaaaggctgacccggccaagggtgaaacgctgtacacgcaaggtgcccccgaccgcaatgtgcccgcctgcctgagctgccacggcgccgccggcaacagtgccgccgccgccaacccgaagctggccgcccagcatcccgagtacgtccacaagcagctggccgacttcaagtccaaggcacgcaacaacgcgatcatggtgccgatggcgtcggtgctgaccgacgaggaaatgcgcaacgtcggcgcctacctggccaagcagtcgctcaagccggccaccgccaagaacaaggacaccatcgaagccggccagaagatctaccgcggcggcattgcagccaagggcgtgcccgcctgcgccgcctgccacggtcctactgcggccggcatccccgcccagtacccgcgcatcggcggccagtgggcggactataccgaggcacaactggtggcattccgccagggcacccgcaagaacaacccggtcatgacgaccatcgccgccaagatgtcggatgccgagatcaaggcggtggcggattacgtcgccggcgttcgataacgattccgcgactccgctggcgcccgccaggcgccggcgcgttggtttggcggtcccccgttccggcggggggccgcggcatgcaaccgaacgcgcctgtcacaatcgaaaagggtggcctgcttgccaaagcatgtccgcccttttttcatttccagccgcacgttgttttaggtttccctgcacatgtcgaccgcttccacttcagggctgcacctgaagacctctcaccgcgtgctgcgcgacgcggtcgaattgttgtcctcgatgcgcttcgcgatcgcgctgctgacggtgatctccatcgccagcgtgatcggcaccgtgctcaagcagaacgagccgtatcccaactacgtcaaccagttcgggccgttctgggccgatgtgttccacacgctgtcgctgcagaaggtctacggttcctggtggttcctgctgatcctggccttcctggtggtgtcgaccagcctttgcctgatccgcaatgcgcccaggatggtggcggacatgcgctcgtggaaggaccatgtgcgcgagcgcagcctgcgcgccttccatcaccgcggcgaattcgacggcgcgcgcccgcgcaccgaggcggtgagccgcctgtcggcgctgctgcgcaaccgcggctaccgcctcaaggcggtcgagcatgacggcgccaccctgctggcggccaaggccggcgcggccaacaaggccggctatatcctggcgcacaccgccatcgtggtgatctgtattggcggcctgctggacggcgacctgctgatccgcgcgcagatgtggctgggcggcaagaccccgatcagcggcaacgcggtcatcagcgagatcccgccgcagcaccggctgtcggcgagcaacccgggctttcgcggcaacgcctacgtgcccgagggctcgaccgtctccaccgctatcctgaacatctcggacggcgcgctggtgcaggacctgcctttcgcgatcacgctcaagaagttcaaggtcgatttctacgagaccggcatgcccaagctgtttgcctcggacgtgatcgtgaccgaccgcgccaccggcaagcagaccgaggccaccatcaaggtgaacgagccgctgatcgtcgacggcatcgccatctaccagtccagcttcgaggacggcggctcgcgcctgaagttcgtcggctacccgatgcagggcagcggccacgccaccttcaccatcgatggcgcggtgggcggcaacaagccgctggcgggcaccggcaccagcgccgacagcgatggcctgacggtcgagttcagcgacttccggctgatgaatatcgagaacgtcaccgatgcctcgggcaagcccgacgcgcgtggcgtggcgcgcaaatcgttcaacgagaccctggaaaagcacctgggcgccgccgccagcaccgaccgcgccaagacgctgcgcaatgtcggcccgtcggtgcagtacaagctgcgcgaccgcaccggccaggcgcgcgagttcaacaactacatggtgccggtgcagatggacggccagtcggtgttcctggccggcatgcgtgaatcgcccagcgaaccattccgctatctgcgcatccccgccgacgaccagggcagcgtggccgactggatgcgcctgcgcgccgcgctgcaggaccgcgcgctgcgcggcgaagccgcgcgccgctttgcgctggcgtcgatgccgggcgatgacaaggctgacctgcgccgccagctggccgaaagctcgctgcgtgcgctcgatctgttcgccggcgccacgcggcccacgccggattcgcccccgggcggtttcaccgcgatcgccgccttcctcgagaaatccgtgcccccggccgagcagcagaaggccgccgacgtgctcctgaagatcctgaacggttcgatgtgggagctgtggcagctggcgcgcgcccaggacaagctgccggtggtggccaacagcgcccagagcggcaccttcctgcagcaggccatcaacgcgctgtcggacagtttcttctacggcgcgccggtgttcctgcagctcgacgacttcaaggagatcaaggccagcgtgttccagctgacccgtgcgccgggcaagaacatcgtgtatcttggctgtctgctgctggtgctgggcgtgttcgcgatgttctatatacgcgagcgccgggtctggatctgggtgaaagacaagcccgccgagggcgacaccgagcctggcagccatgtgctgatggcgatgtcgacccagcgccgcacgatggatttcgaaaaggaattcacggcgctgcgtgacgatatcggccgcgccgcagggggccgcagcgaggcgcccgagcccgccggcaccccccactgaattgagcaggtacgctatgtcctcaaatgtgaaccaggccggtcccgccatgcgcggcaccacgcgcgccgacaccggcgctgacgaggcctatctcgaaccttccttcctgcgccgtctgacctgggtggactggctctttgcgctggcgctggcggttggcgccggcgtggcgctgtcgcaatacgggcagtggatggatggctacgacaaggccgtgctgatcggcgccgtgcctaccttcgcgctgctcggctggcactggaaggcggtgcgcccgctgatgctggcgctcaccgcgctgtcgctgttcgcgatccagctctaccaggggcagctggcgcgcgcggaccaggccttcttcctgaagtacttcctgtcgagccagtcagccatcctgtggatgagcgcgctggtgttcctgtccacgctgttctactggctcgggctggcggcgcgctcgaacacgggctacagcatcggcagcaagctgtgctggggcgcggtggtgctgggcttcaccggcctgctggtgcgctggtacgagtcctacctgatcggcacggacatcggccacatccccatttccaacctctatgaagtgttcgtgctgttcacgctgatcacttcgctgttctacctctactacgaaggccgctacgccacgcgcgcgctgggtccgttcgtgatgctggtggtgtcggccgcggtgggcttcctgctgtggtacacggtcagccgcaatgcgcaggagatccagccgctggtgccggcgctgcaaagctggtggatgaagatccacgtgccggccaactttatcggctacggcacctttgcgctggcggcgatggtctcggtggcctacctgctcaagcagcgcggcatcctggccgaacgcctgccatcgctggaactgctcgatgatgtgatgtacaaggccattgcagtcggctttgccttcttcaccatcgccaccatcctgggcgcgctgtgggcggccgaggcctggggcggctactggagctgggacccgaaggaaacctgggcgctgatcgtctggctgaactacgcggcgtggctgcacatgcggctgatgaagggcctgcgcggcacggtggcggcctggtgggcgctggtcggcctgctggtgacgacctttgcgttcctgggcgtcaacatgttcctgtcgggcctgcacagctacggcgaactgtgacgcggcgccatgctgcaatgcaagaacctgcctccgggcaggttttttttcgtcttttttcaatttttctggatgcccatggaataaaggcgtcacatccggtgtttacttgaggagcggtgccggctggcggcaccggtttgcatggagaacaagatcatggcacgtgtgcgtcttaccactgcagcatccctcgttcgtcccgccgcgctcgcgctcggctgtgcggctgtcctgctcgccggttgttccggcatgggcctgggcggtggcggcggcgccggcaacttgccgcccacggtgaaggtgaccagtggcgtgctgaccgatccgcagggcctgacgctgtacaccttcgaccgcgacaccgccggcagcggcaagagcgcctgcaatggcccgtgcgccaccaactggccgccgctgatggccgcgcctggcagcaatgcgtcgggccagtacaccatcatcacgcgcgatgacggcggcaagcagtgggcgtaccgcggcatgccgctgtaccgctttgccaaggacgccaagccgggcgaccgcaccggcgacaacctcaacaacgtctggcacgtggccaagccctgacgcttcggcagccaccgcagccacagcatggaagggtttgacggccagctcgtcgcgctggcgccgcggctgcggcgccatgcgcgcggcctcaccggcgacgcggcgctggccgacgacctggtgcaggacacgctcgagcgcgcgctgcgctaccgctggcgcttccgcctgcgccccggcgcctggtggggcgacggcgccgatggcctgctgccgtggctgctgaccctgatgcaccgcctgcgcctgaataccgtgcgcaggaaggaactggtggtcaccaccgagacgctgcccgaggtcagcgcccccgctgacgaccccggcctgcgccgtgacctggtgcaggcgctggcgcaactgccggaggcgcagcgcgcggtgctgctgctggtcagcctggaacaactgacgtacgccgaggccgcgcgcgtgctcgatattccgcagggcacggtgatgtcgcgcctggcgcggtcgcgcgagcagatgcggcggctgctcgacggcaaggcgcccgctgccgtgccggcagcttccggcaagcccctgcagcgggtgaaatgatgtccgccatccacgaagccgatctacatgcctacgccgatggccagctttccggcgcgcggcgcgccgccgtggaggcgtacctggcgcagcacccggaggcggcggcacaggtcgcagtctggcgcaggcaggccgatgccctgcacggggcgctggatcccgtactgaacgaacccgtaccgctcgcggccttgccgccggggctgcacggagatcgcaagcgcaatgccgcgcgaaccaggccgcgctgggcgatggcgctggcggccacctgcgcgtcggtggcgctgctggcggtgggcggcgctctcggctggcgggcgcatgaccgccttggcggcagcacgctggtgctggcgcccggcgagcgctttgcgcgcgaggcgctggcgacgcacgcggtctacgctccggaaatgcgccacccggttgaagtcgcggcgacggaagaggcccatctgatcgcatggctgtccaagcgcctgggcacggcgctgcaggtgccggacctgcgcgcgcagggcttccacctgattggcggccgcctgggcgtggccgaaggcggcccgtcggccatcctgatgtatgaagcggacgacggtacgcgcctgtcgctgcagttgcggcgcatggcacagggcacgcccgatacgggcttccgcgtcgagcgcatgccaggcgcaggctccaggcggccagccgccggccgcgacccgatgatggccttctactggatcgaccgcgacctgggctttgcgctggcgggcccgctggagcgggcgcggctgctcacggtggctcagatggtgtaccagcaataccagggcggatagccgcgcgcgaggtgcaggcggcacattgcgtgcgcctggcgcctcatgacccgcggcattccgacgcaggcacaaaaaactgtcaggactggccagcactctccgaccaaggccagagtccaatcctgcaagcgtgtgggcgcgaccggcgccggcacggccaggcaacgaggaaaaccatgctgatcccttcccccaaatggctgcgcggcggcgatatcgccgccggcgaggtcacgccccgtcacgtcttcgaagcgcgccgccgcatgctggcgctggccgcggccggcgcagccggcagcacgctggcgccgtggtttgcgcgccaggccctggcgcaggggcagcacggccagaagctggccgccacgcccaacaacgcctatgtcatcaccgacaagcgcacgcccttcgaggacgtcaccacctacaacaacttctacgaattcggcaccgacaagtccgacccggcgcgcaacgccggcacgctgcgcccgcgcccatggcaggtgtcggtggaggggctggtgaagaagcccaaggtctatgacctggacgagctgatgaagctggcggcaatggaagagcgcgtctaccgcctgcgctgcgtggagggttggtcgatggtgatcccgtgggtcggctacccgctggccgagctgatccggcgcgtcgagccgcagcctggtgccaggtacatccagttcatcacgctggccgacaagaagcagatgcccggcgtcagcagcggcgtgctcgactggccgtacagtgagggcctgcgcatggacgaggccatgcacccgctggcgctgctgaccttcggcctgtacggcgaggtcctgcccaaccagaacggcgcgccggtgcgcatggtggtgccgtggaagtacggcttcaagagcgccaagtcgatcgtgaagatccgctttgtcgacaagcagccgcccaccagctggaacctggccgcgccgcaggaatacggcttctattcgaacgtgaatccggacgtggaccatccgcgctggagccaggccaccgagcgccggatcggcgaggagcgcggcagcggctttggcgcgttgttcgcacccaagcgcaagaccctgccgttcaatggctacggccagcaggtggcgtcgctgtaccagggcatggacctgaagaagttcttctgatgcaaggcgagcgcatggctacctcttccaccagcgccgccgccgtggcggcgcgcaagccggccggcctggccacgctgtcgccgcagcgcgtgcgcgcgctcaagcttgcggtctggctgctggcgctgctgccgttcgtacggctgctgtacctgggtgccacggagcagttcggcgccaatccgcttgaattcgtgacgcgctccaccggcacctggacgctggtgatgctgtgcctgacgctgaccatcaccccgatgcgccgcctcactggctggaactggctgatcaagctgcggcgcatgctgggcctgttcgcgttcttctacggcctgcagcacttcctgctgtggatcggggtggaccgcggctttgacctcgcctacatgatcaaggacgtgtacaagcggcccttcatcacggtgggtttcaccgccttcatgctgatgattccgctggcgctgacttccaccaatggcatggtgcgctggctgggcggcaagcgctggcaggcgctgcacaagctggtctatgcgattgcggtgctggccatcctgcactactggtggcacaaggcgggcaagaacgactttggcgaagtgtcgatctatgcggcggtggtgttcgtgttgctggggatgcggctgtggtggcggctgcgcaagcccgcgggggcgcgccagcccgccgcgtaggcgggccgggcttggggtcttagtcctgcagcaggcgctcgtcgcggaacaggtcctcgaccagttcgcgctcgcgcaccaggtgcacgctggcgccatcgaccatcacttcggcggcgcgcggacgggtgttgtagttggagctcatggtgaagccgtaggcgccggccgacatcactgccagcaggtcgcccggctgcaccgcgagcgcgcggtcgcggccgagccagtcaccggattcgcacaccgggccgacgatgtcgtaggtcgccgcttgcgcgtcgcgcagcaccaccggctcgatgcggtggtaggcctcgtacatggccgggcgtgccaggtcgttcatggcggcatcgacgatgcagaagttcttggccgcgccgggcttgaggaactccacctgcgtcagcagcacgccggcgttgcccaccagcgagcggcccggctcgaacagcacctcgcggtggccgtggccgcgcgcggccacgcgttccagcagcgtggtggcaaagccggtgatgtccggcggggtttcgtcggtgtaggtgatgcccaggccgccgcccacgtcgatatgctccaggcggatgccgtcgcgctcgagcgcctcgaccacgtccagcaccttgtccagtgcttccagatagggctcgacctcggtgatctgcgatccgatatggcagtcgatgccagtcacttccaggtgcggcagcgcggccgcggcgcggtaggtcggcagcacgtcctcgaaggcgatgccgaacttgttgcccttcaggccggtggagatatacgggtgcgtcttggcatccacgtccgggttgatgcgcagcgacacgcgcgcacgcttgcccacgcggccggccacttcgttgaggcggtccagctcggggatcgactcgacattgaagcaacgcacgtcatgtgccagcgccagttccatttccgccgcgctcttgcccacgcccgagaacactaccttgcgcgggtcgccgccggcggccagcacgcgcttgagttcgccgcccgagacgatgtcgaagccggcgccgagcttggcaaacacctgcagcaccgccaggttggagtttgccttcatggcgtactggacctgcgccttgcggccctggcaggcggcggcgtaggcctggtaggctgcggtcagcgccgcgcgcgagtacacataggtgggcgtgccgaattcagcggcgatgcgcgccagcggcacctgctcgacggcaagcgcgccgtcctggcgatggaaaaatgcggtcatggttatcgggtggtgggggcggcaggagacgaggctggctgcgcggcgggggcaggggtggcgggcgggcccggcatggcatcggcgcggcccaggcccggatccgtcacggtcggcggggtcggctcgggcggcactttgggcatggtcagcggcccgcggatgccgcatccgcccagtaggggcatcgcaagggcggcggcaaacgccgatacaatcgcaacacgacgcagcatcgggtcgtcctttaggctgttggcaaggcgttggatggtccgacgcgcaacggccgggcatccgaaggattcttaacaaaaaagccgttcgcgccacgtacgcccggtccgggcagcggcggcaacggcggtctcggagtttagcatgccccccttgagcgaaagcgagttcctggccctggccacgcaggagctggaccgcatcgaagccacggtcgaggcggccgccgacgcggccgacgccgatattgagatcagccgcaccggcaacgtgatggagctggagttcgagaacggcaccaagatcatcatcaacagccaggcgccgatgcaggaactgtgggtggccgcgcgcgccggcggcttccacttccgccgcgacggcgagcgctggatcgacacccgcaacggcggcgagctgtacgcggcgctgtcgggctacgtcagtgagcaggccggcgcggccctcacgctgggctgacgcaaagcctgcctggcgggcaaaagaaaagccggcctcgtgggccggctttctgctgtctggcggccgtgatcaggcgccgccgaacatctccaggatcttcttcttctcggtctcggtgtcggccggcgcgttggtcgactcctccggcttgcccggccacggatcgcccaggcccaccgaagccaccccggcgccgccggcgttctcttcgaaggtccagtcgccgcccaccatcagcacgccttccggcgccgggcgctcgggagactccggcacgcccttgagcgccttgctcatgtagccgacccagatcggcagcgccaggccgccaccggtttcgcgcacgcccaggctcttgggctggtcgtatcccatccaggcgatcgccaccaggttgggcgtgtagccggcgaaccaggcatcgaccgcgtcgttggtggtgccggtcttgcccgccaggtcgttgcggcccaggcgctgcttggcgctgttggcggtgcctatgcgcaccacgtcgcggagcatggtgtcggcgagaaaggcggtgcgtgcatcaagcacgcgcacggcgtcggtgccggcgcgttgcggctgggtttcggagatcacgttgccgcgcgcgtccaccaccttctggatcaggtacgggttgatgcggtagccgccgttggcgaacaccgagtacgcgcccgccatctgcagcggcgtcacggcacccgagcccagcgccatcggcaggtaggccgggtgcttgtcggcctcgaagccgaagcgcgtgatgtagtcctgcgcgtactgcgtgccgatcgcgcgcaggatccgcaccgagaccaggttcttggacttggccagcgcgcggcgcatggtcatcgggccctcgaagcggccgtcatagttcttcggttcccacacctggccgccggtatcggggccgatcgtcagcggtgcgtcgttgatcaccgtggccggcgagaagcccttttccagcgcggccgagtagatgaacggcttgaagctggaacccggctggcgccaggcctgggtcacgtggttgaacttgttgcggttgaagtcgaagccgcccaccatcgaacggatctcgccgtcctgcgggttgatcgacacgaacgccgcggccacttccggcagctgggtcaccgaccagttgcctttctcgtcctgggtcacgcggatgaccgcgccggggcgcatcttcatcttgggttgcgcgttggacgacagcgacggcgcgataaagcgcagcgccgagccctcgatggttgccacttcgcccgacagcagcgtcgccttcacctgcctggccgacacgctggtgaccacggccgagcgcaggtcgccgctgcccgggtgctcgaccagcgcatcgtcgatggcctgctcgcgctcggccgggtcggaaggcaggtcgataaaggcctcggggccgcggtagccgtgcttgcgctcgtagttcatgatgccggagcgcaccgactcataggcggcgtcctggtccggcttggtcagcgtggtgtagaccgtcaggccgcgcgtgtaggtttcttcgcggtactgcgcgtacatcagctggcgcacgatctcggcgacgtactcggcgtgggtcgagaactcgttgccctcggtgcgcaccttcagctcggcatgcacggcctgctcgtactggtcgggcgtgatatagcccaggtcgcgcatgcgctgcaggatgtactcctggcgcaccttggcgcggcgcgggttgaccaccgggttgtacgccgacggcgccttgggcaggccggccagcatggcggcctcggccggcgtcacgtcgcgcaccgacttgccgaaatacacgcgcgcggcgctgtcgaagccgtcggcgcgctgccccagatagatctggttcatgtacagctcgaggatctggtccttgttcaggttggcctcgatcttgtacgccagcagcatctcgtagatcttgcgcgtgtaggtcttttcgctggacaggaagaagttgcgcgccacctgcatggtgatggtggaggcgccctgcgacagcccgccgcgcaggttggccagcccggcgcgcagcacgccgacgaagtcgacgccgccgtgctcgtagaagcggtcgtcctcgatcgccaggaccgcctttttcatcacgtccggaatctcggcgatgggcacgaagttgcgtcgctcttcgccgaattcgccgatcagcacattgtccgcggtatagatgcgaagcgggatcttgggccggtagtcggtgatggtgtccagcgaaggcaggttgggcgcggccaccagcagcgcgtagccgagcagcagcgcaatcacgacggcaccggcgacaaccagtccgaccgcccagaacatgagccgcgtccagatcggacggcgggcagggtgggacggcttgtgttgtgcggtggccataagggaaatacctagtcaggggtgcccgggattatatcttccggcatcggcccgcccgggcgtacagtggtgcgggcgccgctatcgcgctgttacaagatgtaatgtggcgaatgcgtgcacgcacggcgctgttgcgtgcagctaaaggggtgcgggcaggcgcacaagcgcccacggaagggaacccgacgaccgtggggttttggcaacggattggtgaggggcttctcaaaaagaactcggcgccagttcggcacattgccaccgatgctggattttgtgagaatcgaccaacataaaagagcaaacgtttcattcaagaaacaaggctcgcccgattagagcgttcaagccaggggcgagttcaaaagtcagggggtcaccttgcgtcggggcattttgtcggggcttctacgccggactacggtcggtgtggatatcgggtcgtccagtgtcaaggtagtcgagctgtccgtagggggcagcaggcaagactatcggctggaaaaatgcgccagcgaactgctggaccgcaacgccgttgccgatggcaacgtcatcaatatcgaggccgtcgggatcgcgctcagacgcgcgctgggcaaggccggcatccgttcgaaggacgtggtgctgggcgtgccgtccatgctgacggagtcacagacggtcagcctgccggacaacctgtccgacgacgagctgtattcccaggtcgaatccgaggcgcaccggctctatccgccgtcgcaggcggtcaacttcgacttcgccgtgatcggccccagcgagaccgagggcggtatcggggtgcgcgtcacggcggccaacagcgaccgcgtgcaggagcgcgtgaccgcggccgagatggcggggctcaagccccaggtcatggatgtcgaggaatacgcggtgcagcgctcgatcgtgcagatgctgggcgtgccgcacgagatgcccgaggccgatgcgcgcgcgctgccggtggtggcggtgatccatctgggcggcagccgttccaaggcgatcttctaccagggctggaaggaactctacgagcagccgctgaacagctacggcgaccagctcacgcagagtgcggcgcgcatgttcaccctcgacgcgctcaaggccgagatcaagaagcgcaagaacacgctgcctgaagcctggcgcgcgcagttgctcaagccgtcgctggatgcactggcgatggaagtgcagtccgcggtcggcaacttcatcgccagttccagcctgggccgggtcgacgagatcctgctctcgggcggacatgcgtcgctgctcggcgtgcaatcggcaatccagcaccagaccaagatcaccaccacgctggcgaacccgttcgccaacatggcgaccaacgccaaggtcaacgagcgctacctgcagcgcgacttgccggcgtacatcgtcagtgccggcctggccttgcgcggcctgcaataacgcaccggaggcatcagatgtctacgaacacactgccttcggtcaacctgctgccttaccacgaagcccgcaaggcagcacgccgcaagaaggtctatacgatgctggccggtgccgcggtggctggcgctgccgtggtgctgctgggcggcttctatatcgacgggcgcatcgcttcggtggtcgcgctcaaccaggtattgagcactgagaacgccaggctggacgggcagatccgcgaggtcaacagcctgaagaaggacatcgacgcgctgctgcagcgccagaaggcggttgaaagcctgcagaccgagcgcaaccgcccggtgcagctgcttgaggaactggtgcggcaggtgccggagggcgtctacctgaccagcctgaagcagaccggcgaggccttcaccatcgcgggcgtggcgcagtccaacgagcgcatttccgagctgctgcgcaacctgagcggggtggcctggctggacaaggccgaactggtcgaatccaaggccgtcaccatgaccaacaacctgcgcgagcagcgccgcttgttcgacttctcgatgcgcttcgcgtaccgcgcgccggaagcggcggccgacggcaagaagaccgtgccgggcgcctccgcacccgcagccgccccagttcccgcacccgcagccggaaaggcctgaccatggcgctcaatactgaaatcaacctggccgacctgaccggccagttccgcgggctcaacctgagcgaaccggagacgtggccggccgcgccgcgtgtgctgttcgcggtgctggccgcggccgtggtgctggtgctgggctggcagttctactggagcgccaggttcgacgaactcgaccgccagcgccaggagcaggaaagcctgaagcaggcgtaccagtccaaggtggcgcaggtggccaacctggacgcactgcgcgagcagaagaagcaggtggagcagcgcgtggcgctgctggagcggcagctgcccaacaaggccgagatggatgcactgctggccgacgtcaatcacgccggtgtcgcacgggggctgcagttcgagctgttcaagccgcagggggcggtgatcaagccctacttcgccgagatcccggtgaacctgcgcgtgaccgggcgctaccacgaggtggcgcagttcaatgccgacgtggcggccctctcgcggatcgtgtcgatgcagaacctgcagctggccaataccaaggaaggcgggatgtcgatggaggcggtggcgatggcctaccgcgcgctcgacccggacgagcaggccgcgcagcgcaaggccgcggcagccgctgcggcagccaaggcaggaggtgccaagtgagccgcaccgcccgtacccgcagcctcgcctggaccacggcgccacgcacattcgcggcggcggcgctggctgtcggcctgctgggcgcctgcggcgccagcgatgaagacgccttgcgccagtggatggatgccacccgcagcgcgcgcgccaagccgcccgagccgctgcccgacgcccggccctatgtgccgcgcgagtacgccgcagccaaggcgcccgagccgttcgcgcaggccaagatcggcgagctgaacaagacgctcgcggattcgcccgaagccgggcggcgccgcgagccgctggaggactacccgctcgagaacttcaagatgctcgggatgatgaagaagcacggggagaccttcggcatcgtgcgggttgataacaagatccaccatatcaaggtgggtcagtatctcggccagagctatggccgggtggtccgcatcaccgatcaggagatcgtgctgcgcgaattggtccgggagggggtatcagagtggaaagagaaaatgaccagcctgaagctggaggtggcggcatgaccctcgcgcgctggtaccgtgcgctcgcgggcgccgcaagaatggcgatggcgctgttgctggtgattgccgcaccggccgcgctggcacaaagcaaccgcatcaagtcggttgacgtcagcatggtcggggagcagaccgtgttcacgatcgagctcgaacggccgctggcgcagaagccggcggacttcaccacgcagaacccggcacggctcgcgatcgatttcttcgataccggctttgccaaccggcgcgcgcagtacgactacggcggcaagctggtcaagtcagccaacgtggtgcagatcggcgaccgtacccgcgtgatcctcgacctcacgcgcaacgccacctatcgcaccgaccagcgcggcaactacttcgtggtggcgctggataacgtggcgccggcgctcaagaacgctgcgcccacgtttgcgccggctgcgacgcctgcggccgcggcggcgcggccgtcggtgcgcaatgtcgacttccgccgcggtgccgatggcgccgggcgcgtggtggtggacctgtcctcgcgcgactcgggcatcaacatcgcgcagcagggcaagaatatcgtggtcgatttcctcggcaccacgctgcctgacaacctgcggcggcgtttcgacgtcagcgatttcggcacgccggtgcagggcatgcacgcctcggacaccaacggcaacgcgcgcctgacgatcgagccgcgcggcaactgggaatacagctcgtaccagaccgatacccagttcgtggtcgaggtgcgcccggtcaaggaagacccgaccaagctgatcagtggcccgggctaccgcggcgagcgcctgtcgctgaacttccagaacatcgacatccgctcgctgctgcaggtgtttgccgatttcaccaacctgaacatcatcaccagcgaaagcgtgcagggcaacctgacgctgcgcctgaaggatgtgccgtgggaccaggcgctgcagatcgtgatggatgccaagggcctggcctcgcgccgcaacggcaatgtgctgtgggtggcgcccaaggcggagctgcagaccaaggagaagctggagctggagtcgcagcagcagatcaatgacctggagccgatccgcagccaggtgttccagctcaactaccagcgtgccgaagacgtgcgcaagatgctgctcggcatgggggcgggcggcggtgccgtggccgccgtcagtactgccgggtcggcgggcgccagcgcgcgcatgctgtccaggcgcggttcgctgacggccgatgcgcgcaccaaccagctcttcgtctcggatatcgccagcaagctggaagaggtgcagaacttcatcggcaagatcgacatcccggtgcgccaggtgatcatcgaggcgcgcatcgtcgaggccaccgactcgttcagccgcaacctgggtgtgaagctgggctttgccgggcagtacaacaacgcccgcgtcggcaacacgtacaacaacgtgctgcccggggcgacttccgacaacggcccgttcctgagcctgcctgccggcgccatcaacggcaccaacccggccaatatcgcggtcagcctgttcaacagcgccgccaccaaattcctggcactggagttgtcggcgctggaagcggatggcaagggcaagatcatctccagcccgcgcgtggtcacggccaacaacatcaaggcgctgatcgagcagggtaccgagctgccataccaggcggcgacctccagcggtgcgacctcggtgcagttccgcaaggccaacctgaagctggaagtgacgccgcagatcacgcccgaaggtaatgtgctgctcgatgtggacgtgaacaaggacagcgtcggcatccagaccacttccggctttgccatcgacaccaagcacgtgcagacccaggtgctggtcgagaacggcggcacggtggtgatcggcggcatctacacccagaccgagtccaacgaaaccgacaaggtgccgctgctgggtgatatcccggtgctgggctacctgttcaagaacaacgccaaggtgcgcaaccgcaccgagctgctggtgttcctgaccccgcgcatcctgaacgagagcgtgtcgctccggtagggacatggcgtccggaggacgccggatacagtagactggcaggccgcatcgagggatgcggcctttttttgcgcgccgcggggggcggagacggcccgggacgggccagccatgtgggccatgccgcattcgccacttgccggccgcgccacaacataagaagatgatgcagttcccaaccggggaggacggcccgcatgccgcgctcccgaacgacagtccagtgacagcctcagcgacaggcccggcggcacagcgccaggcccaggatcggcgcgatgccgatcgatctgactccgagcgaccggaatccgatcgacccaacctctttttcgtcggcctgatgggcgccggcaagaccaccgtgggccgcacggtggcgcggcgcctgcactatccgtttttcgattccgaccatgagctggaggcccactgcggcgtgcgcatcccggtgatcttcgaggtcgagggcgaagccggcttccgcgaccgcgaggccgcgatgatccgcgagctggccgcgcgccagggcattgtgctggccaccggcggcggcgccgtgctgcgcgccgagaaccgcgaggtgctgaaggcccgcggcacggtcgtgtacctgcgcgccagcccgcacgacctgtggctgcgcacccgccacgaccgcaaccggccgctgctgcagaccgaggaccccaagggcaagctcgaggcgctctatgccgagcgcgacccgctctaccgcgaggttgccgacttcatcatcgaaaccggcaagccctcggtggcgcagcttgctaatatggtgttgatgcaacttgaaatggccggtttcccgatcgatcccccgcagccggcctccgtgccgccggaagcgtcggagccgccggcgcaggaccccaatccatgattacgcttgaagtcgacctgggcgagcgcagctaccccatccatatcggcaccggcctgctggacaacgccgaactgctgcgcccgcatgtacgcggccagcacgccgtcatcgtcaccaacgaaaccgtcggcccgctctacgcggcgcgggtggaggcggccctggccgcgctcggcaagaccgtgcgcaccgtcacgctgcccgacggcgaagccttcaagcactgggaaacgctgaaccggatcttcgacgcgctgctgcaggccggcgccgaccgcaagaccacgctggtcgcgctgggcggcggcgtggtgggcgacatgaccgggtttgccgcggcctgctacatgcgcggcgtgccctttatccagatgccgaccacgctgctggcgcaggtggattcgtcggtgggcggcaagaccggcatcaaccacccgctcggcaagaacatgatcggcgcgttccaccagcccaacgcggtgattgccgacatcgacacgctgcgcacgctgcccgcgcgcgagctggccgccggcatggccgaggtcatcaagcacggcgccatcgccgatgccgagtacttcggctggatcgagcgcaacatcaagccgctgaatgcctgcgaccccgacctgatggcgctcgccgtgcagcgctcctgcgagatcaaggccggcgtggtggcccaggacgagcgcgagggcggcctgcgcgccattctcaatttcggccacaccttcggccatgcgatcgaggccggcatgggctacggcgcctggctgcacggcgaggccgtcggctgcggcatggtgatggccgcggacctgtcgcaccggctgggctttatcgacaccgagacccgcgcccgcatccgcgagctgacgcaggccgccaacctgcccgtggtggcgccggaactcggtgccgaccgctatatcgaactgatgaaggtcgacaagaaggccgaggcgggcagcatcaagttcatcctgctgaagcagctcggcgaagcgttcatcaccaccgtgccggacgctgacctgcgcgccacgctcgcgcacgccgtgctcaaaccacccaccgaggccccggtcgcctgaccgatcggttatgcctcgccaccccgccccagccaccggacgcgccgcatgaccgactttgaaagccatctcgccccttacgccgcccgctctgcgcagacgcgcgggcgggtgcatgcagaacccgcatcgctgtcgcgcagcgaattccagcgcgaccgcgaccgggtcatccacagcacggcgttccggcggctcgagtacaagacccaggtcttcgtcaaccatgaaggggacctgttccgcacccggctgacccacagcctggaggtggcgcagatcgcccgctcgatcgcgcgcaacctgcgcctcaatgaagacctggtcgaggcgatctcgctggcgcacgacctggggcacaccccctttggccacgccgggcaggatgcgctcaatacctgcatgaagaaccacggcggcttcgagcacaacctgcagagcctgctggtggtggacgagctggaagagcgctacggcggcttcaacgggctgaacctgaccttcgagacgcgcgagggcatcctcaagcattgctcgcgggtcaatgcctcggcgctgggcgagctgggccggcgcttcctggagggcacgcagccgtcgctggaggcgcagctggccaacctggccgacgagatcgcctacaacaatcacgatatcgacgacggcctgcgctcggggctgctgacgctggagcagctcgacgaggtgccgatgtgggcccgccaccgcgccgaggtggccgaggtcttccctggcgtcaacggccggcgcgcgatcaacgagacggtccggcgcatgatcaatacgctgatcgtcgacctgatcgagaccaccagcagcaatatcgccgcagccaatccgcgcaatatcgacgcggtgcgcgccgccggcccgctggtcggcttcagcccgcagatgcatgaagaagcggccgaactcaagcgcttcctgttccggcacctgtaccggcactacctggtgatgcgcatgtcggccaaggcgcagcgcattgtcggcgacctgttccaggcctttatgtccgatccgcgcctgctgccgccgcagtaccaggccagccatggcggcgaccagtcgcgtctgattgcccactacatcgcgggcatgaccgaccgctacgcgatccgcgagcaccgccgcatcttcgcggtcagcgaaggcaactgacggccgcgttccggctggccctccaatcggcgcgccagcctgccgcataagtggggacggatcaggctatgatgcgggcatcaatgctcgcatgacctgtcatggcacgccttccccgcttttcccccgccggtctgcccgccctggtgttgcagcgcggcaacaaccgccagcccgtattcctggggccggacgactacctgcactacctcgactgcctgcgcatggccgcgcgcgagcatgaccttgccgtccacgcctacgcgctgcggcctaaccacgtgcacctggtggccacacccaaggagtcagactcgctgagcctgaccatgcaggcggtggggcggcgctatgcgcgctacttcaaccgggtggccagccgcaccggcacgctgtgggaagggcgcttccgttccgcggtgttcgatccggcccggtggatgctgccggcgatgctctatgtcgagggcaacgcgctgcgcgcgggcgaggtcagcgcccccgagggtgaccgctggagcagctaccaccatcacgccggcatcgaggccagcccgtttgtgagcgaccactccgcgtactgggagctgggcaatacgccgttcgagcgccagtcgaactaccggatgctgaccgccgagggcctggcgggcaagaccctggaaaccctgcgcgcccatgcccacagcggctggccgcttggcgacgaagcgttcctggcccaattggagcggcacgcaacccggcgcgtgcaaccgctgccgaaagggcgccccaaaaaggtgcaaacggcaccgttgaatgcgtcagagccgtcgcataattaatgtgtccccatttaaatggatcaccgaaacggtgcgcaacttaatatgatctgaccccatttaaaaattttgcgaggcgaacgcgattcccatatagttgctccacccacagtcattgtgcggcgcgtcacgctcgtgtacgccgctgcggcccgctgacagcttcgtccccattttccgtcccgccggtttccggtttgggtggaggaataaagaaaacgagaaagcgcgcggtccccgttccggtacgcccagccagttcgcgcagccttcaccggaattcagcccgtggaccaaacgaaaaatctttcggcccaagctcaggcacaagcgcagaccagcgagtcttcccacgccattgacctgcgcccgcaagcgcagggcatgtacgatcccagcaacgagcatgacgcctgcggcgtcggcatggtcgcgcatatcaagggcaagaagtcccacgagatcatctcgcagggcctgaagatcctggagaacctggaccaccggggtgcggtcggcgccgatgcgctgatgggcgacggtgccggcatcctgatccagatcccggaccagttctaccgcgaggaaatggccgcgcagggcgtgagcctgccgcccgccggcgaatacggcgtgggcatgatcttcctgccgaaggaacacgcctcgcgcctggcctgcgagcaggaactggagcgcacggtccgcctggaaggccaggtcgtgctgggctggcgcgacgtgccggtcgacgccaagatgccgatgtcgccgacggtgcgcaccaccgagccggtgatccgccagatcttcatcgggcgcggccgcgacatcatgaccacggacgcgctggaacgtaagctctacgtcatccgcaagaccgccagccatgccatccaggcgctcaagctcaagcacggcaaggaatacttcgtgccgtcaatgtcggcccgtaccgtggtgtacaagggcctgctgctggccaaccaggttggcgagtactacctggacctgctggaccagcgcgccgtctcggccctggccctggtgcaccagcgcttctcgaccaacaccttcccggcctgggaactggcccacccgtaccgcatggtcgcccacaacggcgaaatcaacacggtcaagggcaatgtcaactggatcaacgcgcgcaccggcgcgatctcgtcgccggtgctcggcgacgacctgcccaagctgtggccgctgatctacccgggccagtccgacaccgcatcgttcgacaactgcctcgaactgctgacgatggccggctacccgctcgtccacgcgatgatgatgatgatcccggaagcctgggaacagcacacgctgatggacgacaaccgccgcgccttctacgagtaccacgccgccatgatggagccgtgggacggcccggccgcgatctgcttcaccgatggccgccagatcggcgccacgctggaccgcaacggcctgcgcccggcacgtttctacgtgaccgaggacgacatcgtggtgctggcttcggaagccggcgtgctgccgttccccgagtcgcgcatcgttgagaagtggcgcctgcagccgggcaagatgttcctgatcgacatggaacagggccgcatcatcgacgacaaggaactcaaggacaacctggccaacgccaagccgtacaagagctggatcgacgccgtgcgcatcaagctcgacgagctcgacgccaagcctgaagacgttgccgccgagaagaagcccgtggccaagctgctggaccgccagcaggcctttggctacacccaggaagacgtcaagttcctgatggcgccgatggcgctggccggcgaggaagccaccggctcgatgggcaacgattcgccgctggccatcctgtcgtccaagaacaagacgctgtaccactacttcaagcagctgttcgcccaggtcaccaacccgccgatcgacccgatccgcgagaacatggtgatgtcgctggtgtcgttcatcggcccgaagccgaacctgctcgagctgaacaacatcaacccgccgatgcgcctcgaagtgtcccagccggtgctggacttcaaggacatcgccaagatccgcaatatcgagcactacaccggcggcaagttccgttcgtacgagctgaacatctgctacccgaaggcctggggcaaggagggcatcgaagcgcgcctggcctcgctgtgcgccgaagccgtggatgcggtgcgttcgggcttcaacatcctgatcgtgtcggaccgccgcgtggatgccgagcatgttgcgattcccgcgctgctggccacgtccgccatccaccaccacctggtggagaagggcctgcgcacgtccaccggcctggtggtcgagaccggcaccgcccgtgaagtgcaccacttcgcgctgctggccggctatggcgccgaagccgtgcatccgtacctggcgatggaaacgctggccgaaatggcccagggcctgtccggcgacctgtcgcccgagaaggcggtcaagaacttcgtcaaggcgatcggcaagggcctgttcaaagtgatgtccaagatgggcatctccacctacatgtcgtacaccggcgcgcagatcttcgaagccatcggcctgtcgcgcgaactggtgcagaagtacttccatggcaccccgtcgaatgtcgagggcatcggcatcttcgaagtggccgaggaagccctgcgcctgcaccgcgacgcctttggcgacaacccggtgctggaaagcatgctggacgccggcggcgaatacgccttccgcatccgcggcgaagagcatatgtggaccccggactcggtcgccaagctgcagcactcggtgcgcgccgacgacggcaagggcgcctaccagacgtacaaggaatacgccaacatcatcaacgaccagagcaagcgccacatgacgctgcgtggcctgttcgagttcaaggtcgatccggccaaggcgattccgctggaagaggtggagtcggccaaggagatcgtcaagcgcttcgccaccggtgcgatgtcgctcggctcgatctcgaccgaagcccacaccacgctggcgctggcgatgaaccgcatcggcggcaagtccaacaccggcgaaggcggcgaggacgagaagcgctaccgcaacgagctgcgcggcattcccatcaagcagggcgataccctcaagggcctgctgggcgacaacgtgatcgaacgcgacctggaactgcaggaaggcgattcgctgcgctcgaagatcaagcaggtggcgtcgggccgtttcggcgtgaccgccgaatacctggcttcggccgaccagatccagatcaagatggcgcagggtgccaagcccggcgaaggcggccagctgcccggccacaaggtctcggactacatcggcaagctgcgttactcggtgccgggcgtgggcctgatctcgccgcccccgcaccatgacatctattcgatcgaggatctggcacagctgatccacgacctgaagaacgtcaacccggtgtcggacatctcggtcaagctggtgtccgaagtcggcgtcggcacggtggccgcgggcgtggccaaggccaaggccgaccacgtcgtgatcgccggccatgatggcggcaccggcgcttcgccgtggtcgtcgatcaagcatgccggcacgccgtgggagctgggcctggccgaaacgcagcagacgctgctgctcaacggcctgcgcaaccgcatccgcgtgcaggccgacggccagatgaagaccggccgcgacgtcgtcatcggcgcgctgctgggcgccgatgaattcggcttcgccaccgcgccgctggttgcggaaggctgcatcatgatgcgcaagtgccacctgaacacctgcccggtgggcgtggccacgcaggatccgcagctgcgcaggaagttccagggcaagcctgagcacgtggtcaacttcttcttcttcgttgcggaagaagcccgcgaaatcatggcccagctgggcatccgcaagttcgacgagctgatcggccgcgccgacctgctcgacaccaagcccggcatcgagcactggaaggcgcgcggcctggacttcggccgcatcttccaccaggtctcgctgggcgcggacgtgccgctgtaccacaccgacgtgcaggaccacggcctgtcggccgaggccggcaaggcgctggaccacgtgctgatcgccaaggcccgaccggcgatcgagaagggcgagcgggtctcgttcatccagccggtgaagaacgtcaaccgtaccgtcggcgcgatgctgtcgggcgtggtggcgcgccagcatggccacgaaggcctgcctgacgataccatccacatccagctgcaaggcaccgccggccagtcgttcggcgcgttcctggcgcacggcatcacgctggacctggtgggcgacggcaacgactatgtcggcaagggcctgtcgggcggccgcgtgatcgtgcgcgctccgcatgagttccgcggcgacccgacccgcaacatcatcgtcggcaacaccgtgctgtacggtgctatcgccggggaagcgttcttcaacggcgtggccggcgagcgcttcgcggtgcgcaactcgggtgcggtggcagtggtggaaggcaccggcgaccacggttgcgagtacatgaccggcggcacggtggtggtgctgggcggcaccggacgcaacttcgcggccggcatgtcgggcggcgtggcctacgtctacgacgaggacggcctgttcgacaagcgctgcaacacctcgatggtggcgctggaagcagtgctggcttcggccgaccaggagaagggccagcccgaggcttcgtggcacaaggtcgacggcaagcgccagctggatgaggtcatcctgcgcaacctgatcgagcagcatttccgctacaccggttccgagcgcgccaaggcgctgctggccgactggaccacggcacgccgcaagttcgtcaaggtcttcccgaccgagtacaagcgcgcgctgggcgagatgtacgccaaggaacaggccgcccgcgacagcgaccgcgaagccatcgcggcctgagcgagcgcaacgcaaccacgcagaggggccgcggcagccgccgcggccctgacaagattctgaccccaccgcagggctggcgacgccgccggtcccgcgcagcatgaccaaggacgcaacatgggtaaggcgactggctttctcgaatttccgcgccagaacgaaggctacgaaccggtagtcaagcgcgtgaagcactacaaggaattcgtgttcgcgctgtccgacagcgaagcgaagatccagggtgcgcgctgcatggactgcggcatcccgttctgcaacaacggctgcccggtcaacaacatcatccccgacttcaacgacctggtgtaccgccaggactggaagtcggcgatcgaggtgctgcaccagaccaacaacttccccgagttcaccggccgcatctgccccgcaccgtgcgaggccgcctgcacgctgggcatcaatgaactgccggtgggcatcaagtcgatcgagcacgccatcatcgacaaggcctgggaagagggctgggtcaggccgcagctgccgcgccacaagaccggcaagaccgtggccgtggtcggctccggtcccgccggcatggctgccgcgcagcagctggcacgcgccggccatgacgtgaccgtgttcgagaagaacgaccgcatcggcggcctgctgcgctacggcatccccgacttcaagatggagaagacgctgatcgaccgccgcatcgagcagatgcaggccgaaggcgtgaccttccgtccgggcgtgatggtgaccgacggcgaactgccggccggcatcaagaactacgcccgtgaaaccatctcggcccaggccctgatggaccagttcgacgccgtggtgctggcgggcggctcggaagtgccgcgcgacctgccggtgccgggccgcgacctggccggcatccacttcgcgctggaattcctgatcccgcagaacaaggaagtggcaggcgacggcgaaaacgagatccgcgccgaaggcaagaacgtgattgtgatcggtggcggcgataccggctccgactgcgtgggtacgtccaaccgccatggcgccacctcggtgacgcagtttgaactgctgccgcagccgccggaagaagaggacaagccgctggtgtggccgtactggccgatcaagctgcgcacctcgtcgtcgcacgatgaaggctgcgagcgagactggtcggtcgccaccaaggaattcatcggcgagaacggcaaggtcaccgcactgaaggcctgccgtgtcgaatggaaggatggccgcatgcaggaagtcgaaggcagcgagttcatcctgccggccgacctggtgctgctggcgatgggctttaccaacccggtgggttcgatgctggaagcgtttggcgtggataccgatgcgcgcaagaacgccaaggcctcgaccgagggcgagcgtgcctaccacaccaacgtgcccaaggtgttcgccgctggcgacgtgcgccgtggccagtcgctggtggtgtgggcgatccgcgaaggccgccaggccgcgcgttcggtcgatgccttcctgatgggtcacaccgaactgccgcgctgattcaccccggcaggaacaagaagcccgcctggcgcaagccggcgggctttttgtcgtcctcgcgccggcgcagcgctcagtcggccagcgtgcgctccatcagcaccgcactggcgccgtagctggccagcttgggcgcatgggcggtggccgtgtgcgccgccaccgggacgtatccgagcctgtgccaccacggcgccgccgactgcaccgcgatcagccgcgaacgccgcagccccgccgcgcgcgcggccgcctgtgccgcggcgtacaggcgcggcgccaggccggcgccgcgtccggcgggcgccaccgccatgtcgtgcacgaaccaggtgagggcgtccggcgcggcgccatggcgccagccgtggtcgagcacgccgtccagcggcggcagcgtggcttcgggccaggcgtgggtaaagagataggcggcaagcgcgccgggatgtccgggatcgtccgcgacccagcaggtggcgggggacagcgccagccggcttgccagcgcggcctggctctccagcaggacttcggtatagcagctggcttgtaccgccagcacggccggcaggtcggctgtgaccatcggccgcacggtgaaaatcgtcatcggccgattatagccggcgaggtccgtgcatcctggccgccatggcgcgtttggcaaggcctggcggggccttcagggttctcccggctatggtttacgtgcctgtggtgccctgggcaatgtccttacaattttcaaaaaacaactaacggaaactgcctcgcaaatcctttttccccagaaccagcttgccgcctcctcaggggaccggccggaggaaattgatgcccgaagtgcgcaatttgtcgcggctttggcgaggtaaagcgaagttcgcgccgcgccccccaatgggcgcagtccggcgctggctccggtctttcctgtgcctgtacgccctggggtgtgccacgctggcgcttgcggtgccagccatgccggcgcatgcggggacccagcagctcgcccgcagcatgtcgttccccgaccgcccgatgcgcctgatcgtgccattcccggccggcggtgttgccgatgcggtggcgcgcatgctggccgagcgcctctccgtccggctgggcgtgccggtggaggtcgacaaccggcccggcgccgccggcaccatcgccggcgacgtggtcgccaaggccagctccgatggccacaccctgttgttgcaccaggccaatatgctgatccagcccggactggagccggtgccgtacgacgtcgtgcgcgatttcacgccggttgcgcgcgtggccaccacgccgctgttcctggtgatcgatgcccggctgcccatgcgcacgccggagcaatggatgaccgcggtcaggtcgaacccgggctcctacagctatggctacggccagccgggcagcccctcccacctgtacgccgagtacgcggtgcgcggcatccgcagcggcgtgccgctggtcaccgccaagggtgaggccgccgtggtccaggagatgctggccggccgcgtcagtgcctgtttctgttcgtttgccgcggtccagggccaggtcagaagcggcgggctgcgcctgctcggggtgacgggcgtggcccgctcgccgctggcgccgctggtgccgacgctgcaggagtcggggctggaaggctatgccgcggctgcctggtttggcgtgatggcgccggccaagaccccgcgcgcgatcgtcgccaggctggcggtcgaactcgacgcggtcatgtccgagcgcgaggtgcgttcgcgtctgcaggcggcgggggtcacgccgctgcgcgattcgccggaggcgtttgccaccgcgatccgctcggaatctatccaatggcaggtgatcctgaaggacgtctcgccgatacaggagccttgagcagcaaagggatgggcaggtttggggggctagggcaagtctgagaggctcccccgacgggggcatgtggcgcggggcacacgggcgccagcagggctaggtagtacaccttataatgcgcgactgtcctgaccggtgccaacgtgaccgattctgctcaaaacctcgtcgaactgactgcggtggacttcgcctatgcggaccacggcaagccgatcctgtccggcctgaccatgcaattcccgcgtggcaaggtgattgcggtgatgggcggctcgggttgcggcaagaccacggtgctgcggctgatcggcggccaggtccgtcctcaggcaggcacggtcagctttgccggcaccgatatccacacgctggatacccgcggcctgtacgcggtgcgccgccagatgggcatgctgttccagttcggtgcgctgtttaccgacctgtcggtgttcgacaatgtggcgttcccgctgcgcgagcacaccgacctgcccgactcgatgatccgcgacctggtgctgatgaagctcaacgcggtcggcctgcgcggcgcgcgcgacctgatgccggcgcagatctcgggcggcatggcgcggcgcgtggcgctggcgcgcgcgattgcgctggacccggcgctgctgatgtatgacgagccctttgccgggctggacccgatctcgctcgggctgaccgcgcgcctgatccgcagcctgaacgacgcgctgggcgccaccacgatcatcgtctcgcacgacgtgcacgagaccttccagatcgccgactacgtctatttcattgccgacggccgcatcgtcgcgcagggcgagcccgaggcgctgcgcgcctccaccgacccgttcgtgcaccagttcgtccatgccgaggccgacggcccggtgccgttccactacgccggaccttcgctggccgaggatttcgccggaggtgtgcggtgacggacttctttatcaccatcggcgcggccgtgcgccgcagcgtgtcggggctgggccgcgccacgcgcatgttcctgacactgctgggcctgtcgccggcgctgctgcgccgcttccgcctggtgaccgaccaggtcttcttcgtcggcaacctgtcgctggtgatcatcgcggtgtcgggcctgttcgtgggcttcgtgcttggcctgcagggctactacacgctgaaccgctacgggtccgagcaggcgctggggctgctggtggccttgtcgctggtgcgcgagctgggcccggtggtgaccgcgctgctgttcgccggccgcgccggcacctcgctgacggccgagatcggcctgatgaaggcgggcgagcagctgacggccatggaaatgatggcggtgaacccgctgcagcgcgtgatcgcgccgcgcttctgggcaggcgtgatcgccatgccggtgctggcggcgatcttcagcgcggtcggcatcctgggcggctacgtggtgggcgtgcagttgatcggcgtcgacgccggcgccttctggtcccagatgcagggcggcgtcgacgtgcgcgccgacgtgctcaatggcgtgatcaagagctttatctttggcatcgccgtgacgtttattgccctgtaccagggcttcgaggccaagcccacgccggaaggcgtctcgcgcgcgaccacccgcaccgtggtgattgcgtcgctggccgtgctggggctggatttcctgctgaccgcgctgatgttcagcaactgacgcgggccataccaacgacaagacagcgacaagaacactacggggttgaagaaagagattccaatgaaaaagaacgcactcgatttctgggtggggctgttcgtggcggcggggttcgtcgccgtgctgttcctggccctcaaggcggggaacatgagcgccttttccttccaggacacctacagcgtgcaggcgcgctttgacaacatcggcgggctcaagccgcgcgcgccggtcaagagcgcgggcgtggtggtcggccgcgtggcggcgatccgcttcgacgacaagacctaccaggccaccgtcgagatgagcctggagaagcgctaccagttccccaaggacacctcggccaagatcctgacatccggattgctcggcgagcagtacatcggcctcgaagccggcggcgacaccgccatgctggccgaaggcgcgcgcatcaccatgacgcagtcggccgtggtgctggaaaacctgatcggccagttcctgtacaacaaggcggcggatgccggcggcggtgcgccggccggtgccagcgcgccggcgccggcaggggacctcaaatgagcgctgcgccatcgttctgcaagggcctggccgcagtcgctgccgcggccgtgctcgccggttgcgccactggccccaccgccaatccgaaagacccgctggagccgttcaatcgcgaagtctcgaagatcaacgaggacttcgacaagggcatcctgcgcccggtggcccaggtctatgccgactacatgcccacgccggtgcagcgtgcggtggagaatttcttctccaacgtgagcgatgtctactcggcggcgaacaacctgctgcagggcaagcccacccgcgccgccgaggacaccatgcgcgtggccatgaacaccgtgctggggatcggcggcctgatcgacatcgccaccccggccggcctgcccaagtacaaggaagacttcggccagacgctgggcgtgtggggcgtgccgcccgggccgtacctggtgctgccgctgttcgggcccagcaccgtgcgcgacaccggcggcatgctggtggaccgcagtttcgacccgtcggcctatctctatccggtatcgctgcgcaattcactgaccggcgtgcgcatcgtcgccggccgggcgcagctgctcggcgccagcaacctgctggagcaggcggcgctggacaagtactcgttcctgcgcgattcctacctgcagcggcgccagtacctgatctacgacggcaacccgcccgacggcgacgaggatgcggacagcgccccggagaccccgacggcgcgccctgaagcccctgccgggaccgaaggtgaaaagcccgccacgcccgccacgcccgctacgcccgctacgcccgctacgcccgctacgcccgctacgcccgctacgccggcgcagcccgcagcaccggctcctcccgcgccgccggccgacgcctcggccccggccgccacccaggcccagcctgcgcagacgccctcgggcgacctgcagcctgagagccagagcctgccgataccacccatggacccgatgcagcggatcgtgccgggggtccgtatccgctgaccctgcgaggcgcgggcggctccaggcccacgccaggctgtgaatgccctgtgagggctgaaacaatttgtttgtaagtagcggaaaaggcgcttgtgggtgcaaccaccgccccgcgcttatgttccaatctccgcaaggccgcgcgccagccatggcgcctggccagttcgccctcggcgaagaacgtctttgataaagaaggaaaatccatgataaagcgactgttggtccccttccttacggtagttgccttcgcaggcgcggcgcatgcccaggtggcggcccaggacgcggccaccccggacgggctggtcaaggccgtggtcagcgacgtgatgaccaccgtcaaggccgacaaggacatgcaggccggcaatatcggcaagatcaccgcgctggtcgagcagaagatcatccccaacgccaacttccagaagaccacgcagatcgccatggggcgcaactggtccaaggccacgcccgagcagcagaagcagatcaccgaggagttcaagaccctgctgatccgcacctatgccggcgccattgcccagatccgcgaccagaccgtgcagtaccgcccgtaccgcggcacggctgaggataccgatgccaccatccgcacccaggtcgtcaacaagggcgagccgatccagatggactaccgtctggaaaagaccgcccagggctggaaggtctatgacatcaacgtgctgggcgcctggctgaccgaagcctacaagggcagcttcaacaccatcgtcggccagcagggcgtcgagggcgtgatcaagacgctgcaggaccgcaaccgccagctggccagcgccaagagctgaggcgcctgcccaacggtgcgccgctgcaacgcagcacggcgcaccgatctgctctacaatggccgctcgcggcacagactcccgcctgacgtgcgggagtcgtcgtttttgccactgtattcaagctaccgatccccaggccacgcatccatgctctcgctaggtacctcgctgaccaaccagaacgccgccgccgtgctgcgtgacgggctggcgcgcctggcgcagggcgaggtgcaggtcgactgcaccggcctggcgcaggtggattcctccgcggtcgccgtgctgctggcatggaaccgcgccgccgccgcgcgcaaccaggcgctgtcgctgcgcggcgtgccgccgcagctgtcgcaactggccagcctgtacggcgtggacggtctgctgggcctggccccagcagccgcagcgcaggggcaccaccaccgacattgatccggcatcgccggtcgccagcacggcggccgcccgcgatgccgcggcgacggccctgcgcggtcgccgagcccctgggggcggatcaagcgggaccatccccgcatcccctataattccgggttgttcgcccatccccccgcctgctaccggttcatgccatgccgggccaggaagtccgggcacgcagttgctccccaattcccggcggctggccctgaaaatgccgaacccgccacaaacaatcggccatgaaagccattgaaatccacgacgttcgcaagcgctaccgcaacctgcaggcgctcaagggcgtcagcttcaccgtcgaacgcggcgaattcttcggcctgctcgggcccaacggcgccggcaagaccacgctgatctcgatcctcgccggcctgaaccgcgccgattccggccgcgtcagtgtgcttggccacgatgtcgttgccgactaccggatggcccggcgtatgctgggcgtggtgccgcaggaactggtgttcgatccgttcttcacggtgcgcgagacgctgcggctgcagtcgggctactttggcctgacccgcaacgacgactggatcgacgagatcatggccaacctggacctgaccgggaaagccgacgccaatatgcgccagctctcgggcggcatgaagcggcgcgtgctggtggcgcaggcgctggtgcaccgcccgccggtgatcgtgctggacgagcccaccgccggtgtggatgtggaactgcgccagacgctgtggaaattcatctcgcgcctgaaccgggaagggcacaccatcatcctgaccacccactacctggaagaggccgaggccctgtgcgaccgcatcgccatgctcaagttcggcgaggtggtgacgctggaccgcaccagcaacctgctgacgcagtttgccggcctgcagctggtgctgacctttgcgcgcggcgtcctgccgccggcgctggagccgttgcgcatgccggccaaccccggcgagcgcgcggtacgcctgcggttgtcgggctaccaggcggttgaaccgatcctggccgcctgccgcgaagcgggctgtgacatcgaaaacatggaaatcaacaaggccgacctcgaggacgtatttgtgcagatcatgcgccgcgaggggcatatgcccggtgcgctgcccgatccggcgatggaggccgtggcatgaagcagcctggcgatatcgaggtcctggacgactccggcctcgggccgatggccgtgggcggcctggtgggtttccgcaccctgctgtacaaggaagtgctgcgtttctggaaggtgagcttccagaccgtggccgctccggtgctgaccgcggtgctgtacctgctgatcttcggccatgtgctggaagaccgggtcaaggtctatgaccagatcagctacaccgccttcctggtgcccggcctggtgatgatgagcgtgctgcagaacgcgtttgccaacagctcgtcatcgctgatccagtccaagatcaccggcaacctggtgttcgtgctgctgccgcccttgtcgcactgggaaatgttcggcgcctatgtggtggcctcggtgatccgcgggctgaccgtgggcctgggcgtgctgctggtgacggcgtggtttgccaacctgcattttgccaatgtgggctggatcctcgtctttgcgctgcttggtgcgggcatcctaggcacgctgggcctgatcgccggcatctgggccgagaaattcgaccagctggccgcgttccagaacttcctgatcatgccggcaactttcctgtccggcgtgttctattcgatccattcgctgcccgccttctggcaggcggtgtcccatgccaatccgttcttctacatgatcgacggcttccgctatggcttcttcggcgtctcggacgtgtcgccgctgttcagcctggcggtggtcggatcggcgttcgtggtgctggccgcgctggcgctgcgcttgctgaagtccggatacaagctgcgccactgaactgtggccggccatactgaatcacgctgaagagaaccccatgctgcctacaccggaacaagtcagggattacattgcccaaggactgccctgcgaacatctgcaagtcgagggcgatggccagcacttctttgccaccatcgtcagcgccgaatttgaaggcaagcggctgatccagcgccaccagcgcgtctatgccgcgctgggcgaccgcatgcgtgccgagatccacgcgctgtcgatgaagacgctgacgcctgccgagtggcaggcgggcgaaggcaagtaagccccgccaatatgcgccgcgccacccgcgcggccccagaaccatgacgccgggcgcgtgcccggctccagacgacagaacatggacaaattccagatccacggcaatggcccgctgaagggcgaaatccgcgtgtcgggcgcgaagaacgcagccctgccaatcctgtgcgcgggcctgctgacggcggataccgtttcgctggacaacgtgcctaacctgcaggacgtgcgcaccaccctcaagctgctgcgccagatgggcatgcaggccgagctggatggcgcccgcgtgaccctgaacggcgccgacgtcaacgtgctcgaggccccgtacgagctggtcaagaccatgcgcgcctcgatcctggtgctgggcccgctggtggcgcgcttcggcgaggcccgcgtgtcgctgcccggcggctgcggcatcggcgcgcgcccggtcgaccagcacatcaagggcctgcaggcgatgggcgccgagatcaccatcgaacacggctttatccatgcgcgggccaagcgcctgaagggcgcgcgcgtggtcaccgacatgatcaccgtgaccggcaccgagaacctgctgatggccgccacgctggccgaaggcgagaccgtgctggaaaacgccgcgcgcgagcccgaggtgaccgacctggcccaactgctggtcaagatgggcgcgaagatcgaaggcatcggcaccgaccgcctggtagtgcagggcgtggagcgcctgcatggcgccagccacagcgtgatcgccgaccgcatcgaggccggtaccttcctgtgcgccgccgccgcgacgctgggcgacctggtgctgcgcggcgtgcagccggacatcctcgacaccgtgctcgacaagctgcgcgaagccggcgcaaaactcgagaccggcgccgactggatccgtctggccatgccgcaacgcgccaaggccgtgagtttccgcacctcggaatacccggccttcccgaccgacatgcaggcgcagttcatggcgctcaatgccgtggccgaaggcaccgcgcgcgtgaccgagaccatcttcgaaaaccgcttcatgcacgtgcaggaactgaaccgcctgggcgcggacatcgcggtcgaaggcaataccgcggtggtcaacggcgtgccgcgcctgtcgggcgccaacgtgatggcgaccgacctgcgcgcctcggccagcctggtgatcgccggcctggtggccgatggcgagaccgtgatcgaccgcatctaccacctggaccgcggctacgaccgcatggaagacaagctgtcggcagtgggcgcgaagatccgccgcattgcctgaggaagtccgatgagccccactttcaacgcatcgcccaaccagctgacgctggcgctgtccaagggccgcatcttcaccgagacgctgccgctcctggaagccgccggcatccgcgtcaccgaggaccccgagacctcgcgcaagctgatcctgccgacctccgatccggccgtgcgcgtggtgatcgtgcgcgcctcggacgtgccgacctacgtccagtatggcgccgccgatttcggcgtggccggcaaggacgtgctgatggaaagcggcatggccggcctgtatgcgccgatcgacctgaacatcgcgcgctgccgcatgtcggtggcggtgccggccgggtttgactacgccaacgcggtgcgccagggcgcgcgcctggccgtggccaccaagtatgtgcagaccgcgcgcgagcattttgcgaaaaagggcgttcacgtcgacctgatcaagctgtacggttcgatggagctgggcccgctggtgggcctgtccgacgccatcgtcgacctggtcagcactggcagcacgctgcgcgccaacaacctggttgaagtcgaagagatcgtgcagatctcgtcgcggctggtggtgaaccaggccgcgctcaaactcaagcgcgagcggcttgcgccgattctcgacgcattcgaacgggcttcggcggcgctggcgtaaggccacaccaggcccgcgccgactgagaggaaagtagtcatgaacgcaaccgaaatggaaaacctgccgatccgccggctcgattccagcaagcctggctttgccgaggcgctgcgccaggtgctggccttcgaggctggcgaggacgaggccatcgatcgcgccgccgcgcagatcctggctgatgtgaaggcgcgcggggatgccgcggtgctggaatacaccaggcgcttcgaccgcgtggaagcgtcgtcgatgggcgcgctggaggtatcgcagcagcagctcgaagccgcgctcgaagacctcgaacccaagcgccgcgccgcgctggaggccgccgccgcgcgcgtgcgcgcctaccacgagaagcagaagatcgaatgcggcagccacagctgggaatacaccgaggccgacggcaccatgctgggccagaaggtgacgccgctggaccgcgtcggcatctacgtgccgggcggcaaggccgcgtatccgtcgtcggtgctgatgaacgcgatcccggcgcgcgtggcgggcgtgaaggaaatcatcatggtcgtgcccacgccgggcggcgtgcgcaatgagctggtgctggccgccgcgcagatcgccggcgtcgaccgcgtgttcaccatcggcggcgcccaggcgattggcgcgctggcctacggcacggcgacgctgccgcaggtcgacaagatcgtcggcccgggcaatgcctatgtggccgcggccaagcggcgcgtgttcggcaccgtcggcatcgacatgattgccggcccgtccgagatcctggtgatctgcgacggcaccaccgaccccgactgggtggcgatggacctgttctcgcaggccgagcacgacgaactggcgcagtcgatcctgctgtgcccggacgccggctatatcgcccgcgtcgaagccagcatccagcgccagcttggcaccatgccgcggcgcgaggtgattgccgcctcgatctccggccgtggcgcgctgatcaaggtgcgcgacatggaagaggcctgcgagatcgccaacgcgatcgcgcccgagcacctggagatctcggccgagaacccgcgccagtggagcgaaaagatccgccacgccggcgccatcttcctgggcccctataccagcgagtcgctcggcgattactgcgcgggcccgaaccacgtgctgccgacctcgcgcaccgcgcgcttctcttcgccgctgggcgtctatgacttccagaagcgttcgagcctgatcgaagtgagcgagggcggggcgcagatgctcggccagatcgccgccgagctggcctatggcgaaggcctgcaggcccacgcccgcagcgcggaatatcgtttcaccaaacgcagttgatctactgacccacgctgcctgataaggcagccaacttaggagttcccatgccagccgtagagccctccctgatcgaacgcatcatccgtgacgacgtacgcgccatgggcgcctaccacgtgccggattcgcacggtctggtcaagctcgacgcaatggagaacccgtaccggctgcctcccgctctgcgccgcgaactggccgagcgcctgggcgaggttgcgctgaaccgctacccggtgcccagcagcgaagcgctgcgcgccaagctgaagaccgtgatgcaggtgccggccggcatggacgtgctgctcggcaatggctcggacgagatcatcagcatgctggcgctggccgcggccaggcccggcgccaaggtaatggcgccggtgccgggcttcgtcatgtacgcaatgtcggcgcagttcgccggcctgcaattcgtcggcgtgccgctgcgcgcggacttcacgctcgaccgcgccgccatgctggcggcgatggccgagcaccagcccgccatcatctacctggcgtacccgaacaaccccaccggcaacctgttcgatgccgccgacatggaggccatcgtccgcgccgcccagggcgaggtctgcaacagcctggtggtggtggacgaggcctaccagccgttcgcgcagcacagctggatgccgcgcctgacggaattcggcaaccttttggtgatgcgcaccgtatccaagctgggcctggccggcatccgcctgggctacctggccggcgcgcccgaatggctgtcgcagctggacaaggtgcgcccgccgtacaacgtcaacgtgctgaccgaagccgccgcgctgttcgcgctggagcacgtgtcggtgctggacgaacaggccgcccaactgcgcgacgaacgcgcccgtgtggccgaaggcatggccgcgaatgcgggcgtgacggtgttccccagcgccgccaatttcctgctcgcgcgcgtgccggatgccgcacagacgttcgaccggctgctggcccgcaaggtattgatcaagaacgtgagtaaaatgcacccgttgctggccaattgtctgcgcgtcacggtcagcacccccgaagaaaacgcgcagttccttgaggcattcgcagcgtcgctgcaggattaacaccatgcgtgttgcagaggtcacccgcaatacttcggaaacgcaaattcgcgtttccctgaatctcgacggcagcggccgccagaaactggcgtccggcgtgccgttccttgaccacatgctggaccagatcgcccggcacggcatgttcgacctggaggtcgaagccaccggcgacacgcatatcgacgaccaccacacggtggaagacgtgggcatcacgctcggccaggcggttgccagggccatcggcgacaagaaaggcatcacccgctatggccacagctatgtgccgctggacgaatgcctgtcgcgcgtggtgatcgatttctccggccgtcccggcctggaattccacgtgccgttcacgcgtgcgcgcgtgggcagcttcgacgtggacctgaccatcgagttcttccgcggcttcgtcaaccatgcgggcgtgaccctgcatatcgacaacctgcgcggcatcaatgcccaccatcagtgcgaaaccgtgttcaaggcctttggccgggcattgcgcatggcggtggagctggacccgcgcgcggcgaacacgatcccgtcgaccaagggtacgctctgacctttccaccacggtaggcgtgccggctggttgcggcgcccgctgaccttccaagcctgaacctggccagcgatgctggcgacccgcaaccgatggatacgctcaagtcgtttatttcgctgctggcgctgatcaacccgatcggggcgatcccgttcttcatcagcctgaccagcctgcagacggaagcggaaaagctgcgtaccatcaagatcgcatcggtttcggtggcgatcgtggtggcggtgtcggccttgctggggcagcagatcatcgagttcttcaatatctcggtggcgtcgctgcaggtgggtggcgggctcatcatgatcatgatggccatgaacatgctgaacgcgcagaccagccgcaccaaggccacgccggaagaagaggacgaggccgaggtaaagtccagcatcgcggtggtgccgctggcgctgccgctgctgaccgggccgggctcgatcagcacggtgatcgtctatgccggcaagacccagcactggtaccagttgctgatcctggtcggcctgggcgtggtgatcggtgcggtggtgtacctggtgttccgcgcggccgacccgatcgcccgggtcatcggccgcaccggcatcaatatcggcacgcgcctgatggggctgatcctgtcggcgctggccgtggaattcattgtggacgggctgaagacattgttgcctgttttgaaatcatgactaccatagcaattgtggattacggcatgggcaacctgcgctcggtggcgcaggcgctgcgtgccgcggcgccggaagcggacgtgcgcgtggtggatgcccccgaaggcatccgctcggcggaccgcgtggtgctgcccggccagggcgcgatgcccgactgcatgtcggcgctgggcgcgtccgggctgcaggaggcggtggtgcaggccgccgccagcaagccgatgctgggtgtgtgcgtgggcgagcagatgctgttcgagttcagcaccgaaagccgggccggcgcggaccgtacgccggcgctgggcctgatgcccggccaggtggtgcgctttgcgctggacggcatgacgcagcccgacggctcgcgctacaaggtgccgcagatgggttggaaccgggtgcgccaggccaggcctcacccgctgtgggacggtatcccggacgacagctggttctatttcgtccacagttactatgtgcaggcgcaggacccggcccatgttgccggtgaaacggaatacggagtcgtatttaccagcgcggtagcgcgcgataatattttcgcgacgcagttccaccccgagaagagcgcggccctgggcctgcagctgtaccggaacttcgtccactggaagccctgacccgattcgtttttttaccgatcatcgaccgctaactcgacccgtcacccgacctgtttccgatcgactatcgacccgacctgaccggcagcgccggtctcgctcaatctctatcactcaaccacgctcgtcacgcatatgttgctcattccggccatcgacctgaaggacggtcagtgtgtacgcctcaaacaaggcgacatggaccaggccaccgtcttttccgaagatcccgccgccatggcacgccactgggtggagcagggcgcccgccgcctgcacctggtggacctgaatggcgcgttcgtgggcaagccccgcaacgaggaggccatcaaggccatcatcgccgaggtcggcgacgagatcccggtgcagctggggggcggcatccgcgacctgaacaccatcgaacgctggctggatgacgggctgtcgtacgtcatcatcggcaccgccgcggtgaaaaaccccggtttcctgaaggatgcctgctcggccttcggcggccatatcatcgtcggcctggatgccagggacggcaaggtagcgaccgacggctggagcaagctgaccggccacgaggtggcggacctggcacgcaagtatgaagactacggcgtcgaggccatcatctacaccgatatcggccgcgacggcatgctgcaggggatcaatatcgatgccaccgtcaagctggcgcaatcgatgtcgatcccggtgatcgccagcggcgggctgtccaacctggccgacatcgacaatctctgcgcggtcgagggcgaaggtgtcgaaggcgtcatttgcggccgcgcgatctactccggggatctcaactttgccgccgcgcaggcactggcggacaagctgcgcgacgggcaataaggcaacgcgccgcgggcgcagccgccgccagactggagctggcggcggacaaggaatctcatgctagccaaacgtatcatcccctgcctggacgtgaccaacgggcgggtggtcaagggcgtcaactttgtcgagctgcgcgacgcgggcgatcccgtggaaatcgcgcgccgctacgatgagcagggcgccgatgaaatcacattcctggacatcaccgcgaccagcgacgggcgtgacctgatgctgcacatcatcgaggatgtggcttcgcaggtctttattccgctgacggtgggtggcggcgtgcgcacggtcgaagacgtgcggcgcctgctcaatgccggcgcggacaagatcagcgtcaattcgtcggccatcgccaatccgcagctggtgtcggatgcgactgccaagtacggctcgcaatgcatcgtggtggcgatcgacgccaagcgcagttccgccccgggcgaagcgccgcgctgggaagtcttcacccacggcgggcgcaaggccaccgggctggatgcggtcgaatgggcgcgcgagatggccgcgcgcggcgccggcgagatcctgctgaccagcatggaccgcgacggcaccaagagcggtttcgacctggaactgacccgcgccgtcagcgacgcggtgccggtgccggtaatcgcctcgggtggcgtcggcggcctgcaggacctggccgatggcatcacccggggccgcgccgacgcggtgctggccgccagcatcttccactacgggcaacacaccgtgggcgaagccaaggcattcatggcccgcgagggcattcccgtgcggatctgatcatggcaaagaagtggctcaacaaggtcaaatgggacgataacggcctggtgccggtgatcgtgcaggaagtcggctcgaacgacgtgctgatgttcgcgttcatgaaccgcgacgcgctgcagcgcaccgtggagctgggcgaggccgtgttctggtcgcgctcgcgcaagcgcctgtggcacaagggcgaagagtccggccatgtgcagaaggtgcacgagatccgcctggactgcgatgaagacgtggtgctgctcaaggtgacccagatcgacaatatcgcctgccataccgggcgccattcctgcttcttccagaagttcgagggcgatgtggaagtcggcgactggcagacagtcgagccggtgctgaaggaccctgcccagatctacaccaagccatgagcgacaaccaactcagcagcaatgatgtcctggcgcgcctggccgaagtgctggaatcgcgcaagcccgccaacggcggcgaccctgacaaatcctatgtggcgcgcctgttcagcaagggcgacgacgccatcctgaagaagatcggcgaggaagccaccgagaccgtgatggccgccaaggacgcgcgcgccgccgggcagactggcgccgaggccggcaaggtggtttatgaagtggccgacctgtggttccacagcatggtattgctggccaacttcggcctgacgccggcggatgtggtcaacgagctcgcgcggcgcgaggggctgtccggcctcgaggaaaaggcccggcgcaaggactagctggcgcaggcgccggccggtcttccgcctgcccgcaaggcaggcttctaaccaagggcaatgatggcgaacgactacaccgggcaagtcaccacccccagcggcgagcagttgagcagcctgcgcaagctgctgcacatcctgtatgccctgtatgcgatcttctggctgaccggcggcatcaccgcgctgatcgccatcgtgatcgactacgtcaagcgcgacgacgcgcgcggctcgctgtatgcctcgcacttcgcctggcagatccgctcgttctggtggtcggtggtgtggggcgtgctgggcggggtgctgttcgcgacagtcgtgctgatgccgctggcctttgccgtctggggcgtgctgtcgctgtggatgctgtatcgtatcgtcaagggctggctgtacctgaatgacagcaagccgatgtacccggatcagcagttctgatcccgggcaggccgggcgcgtgaagctgacaccgggtgccgcggccgtcgcaatgaaatcttcatgaacgctcaggataattgcatcttctgcaagatcgtggccggacagctaccgtcgcgcaaggtctacgaagacgacgatatggtggccttccacgatatccatcccaaggcaccggtacacttgctggtcgttcccaggtcgcatgtcgactcgctggccgattgcggcgccggcgaaggggagctgcttgctagaatgatgctgaaggtgcctgaactggcgcgggcggcaggctgtgccaacggattccggacggtgatcaacaccggcccggacggcggccaggaggtctaccacctgcatctccatgtgttgggcgggccgcgccacgagtggaagggaccgctgccctgaccggcagcttttggcatgggagtgtccgcggcggcaacgcctcgggcagaagctgcgtcggcaaccgtcgcccggcgcggccataacgggacggaacaacgggtccgggcatatctgattgcgcccgcggcttcatcaggagcaagaaatgggttcgtttagcatttggcactggctgatcgtgctggtgatcgtcatgctcgtgttcggcaccaagaaactgcgcaatatcggccaggacctgggcggcgcggtcaagggcttcaaggacggcatgaaggacggcgagggcaaggctgccgccgatcccgcccagtccaaggaactgcgcgactccaccaccatcgacgtcgaagccaaggaaaagacccgccagcagtaatccggcggtgtgccatcccttctacgcaaacctcgctgcctgcgtgtcgtcccgcgcctgcgcttttccgcatgttgtccgcatgatgtgtccgcatgattgatctcggcatttccaagctggcgctgatcggcgccgtggcactgatcgtgatcggtcccgaacggctgcccaaggttgcgcgcactgtgggcgcgctggtcggccgggcgcagcgctacatcaacgacgtcaaggccgaagtcagccgcgaggttgaactggaagaactgcgcaagatgcgcacggaattcgaggacgccgcgcgcgatgtcgagcgcaccatccataaggaagtcaacgagcagacccaggcgctgaacgaagccctgggcggtgccgaggggaccagcggcggcggtagcgccgacgccggcggcggcttcgtgccaagctgggatgcggcccacaaggcgcacaacgggcgcaagagctggcgcgtcaagcagggcgcccgcccgctctggttcaagcgccagcacaatgtccgcgtctgggtgcagtcgggcgcggcgcgcgtcaagcgccaccggccggtcacccggccatcccgatccttcttcgagtgagcatgcgccgcggcatcaccttgccggccgtcgttccggccgctgccgtcgtggctgcagtcctggttgcattcgcgcgccgccgcgttgcggccccatcgatccaccttgccagcccccgcggctgagcggttcacgccatgagcgacacccggtccccagatccccaagacccgcaagacgagtcgcagcaggaaacctttatttcccacctggtcgaactgcgccaacgcctggtcaaggcggtggccggcatcatcctggtcttcgtcagcctggtctactgggccccggtgattttcaacctgtttgccgcgccgctgatggagtcgctgcccaagggcggcaagatgatcgtgaccgatgtcaccggctcgttcttcgtgccgatgaaagtcaccttgctggtggccttcctgatcgcgctgccgtgggtgctgtaccaggtctggcagtttgtcgcgcccggcctgtaccagcatgagaaacgcctgatcctgccgctggtatcgagcagctatttcctgttcctgtgcggcgtggcgttcgcgtatttcctggtgttccccacggtgttccatttcatggcgcactacaacgccccgctgggggcggagatgtcgactgacatcgacaaatacctcagctttgccatgaccactttcctggccttcggcatcaccttcgaggtgccggtggtggtgatcgtgctggtgcgctttggcgtggtggagctggaaaagctcaagcagatccgcccctatgtgatcgtgggggccttcatcatcgctgccatcgtgacccctcccgatgtgctgtcgcagctgctgctggccgtgccgctggtggcgctttatgaactcggactgctactggcgcgctttgtcggccgtccgtcacctgaagcgactgcttcaggggaaacgcagcccgactaattcggctgaggtaggcctttcgtatctgctaatccccgtttttgcaccaaaacggggattttccctcccattcctgttgctcccccacaacaaaaaccgccagtaagcatggtttacgccgaaaaagccttctgacggccgggggggctggcacataatacgcagcagacgtgaatgtaaatgcgtcgcccaagtacttgggcaaccaagatttcccaatcagttgacaaggaaagtgtcgatatgaagatgaaactgtttgctgctgccgtcgccgctctggccgctggtggcgcctatgcccaatcgagcgtaaccctgtacggcgtggctgacgtcggcctcgagtacgtcaacaacgctaacgccgctggcgacgacctgttccgcatgtcgtcgggtaaccagtccggttcgcgctggggcctgcgtggcgtggaagatctgggcggcggcctgaagggcgtgttcgtgctggaaagcggtttcgacctggacacgggcagcaatgccacgagccaaggtggtcgtctgttcggccgtcaagcctacgtcggtctgcaaagccagttcggctcgctgctgctgggccgtcaacaaacgtcgttctatgacttcggtctgcagttcgacccgatggccatttcgtcgcgttacggcatcctgtcgcaagacagcgccttcgcttcgcgcgctgacaacaccgtcaagtacatcggcaagttcggtggcctgaccgcttcggccttctacagcttcaacaacaacggccaggaagtcgccggcgcattccgccgcggccaacagtacggcgcgctggtgagctacgcagctggcccgttcgcggttggtgctgcttatgacgaaatccacggctcgaccaccggtacgcctcccgtcgatgcaagcggccagcgtactcgccgtgctaccgttggcgccaactacgccttcggtccggccaaggtctacgccggctatcgctgggccaaggccttcgacggcgctgctctgacgggcggcacgacggttgacaatggtgtcctgaccacgtcgacggcttcgaacctgtactggctgggtctgggttaccaactgaccccggcgttctcgctgtcgggcgctgcgtactaccaagacttccgcaagagcgaagccgatccgtggcagttcgtgatcacggccgactacgcgctgtcgaagcgtaccgacgtgtacacctcgctgtcgtacaccctgaacgacaagggctcggccctgggcgtgaacggtttcaacaccgccaccaccaccaacgttcaggcgaacaaggatcagttcggtgctgtggttggtctgcgccacaagttctaatctgacgcgggtgtaagcccgcttaggattggcttgaaccaagaggccggcatcccaaggatgccggcctcttgtcttttgtggcaccaaatgctggtacaggctgttgcgctgttatcgtgctgtgccagccatgctgcgcctggatggccggccagagggcgggtggcgtgggtgcagcgcggtgtgccggcgttctgcttcgcggcgatgtggatcaggcgcggcgttgctcatgtcgatcgtgacccggtatgcacgtcgatcacgccccccgggcgtgagtttgcgcctgccagtgacggcccctggttccaccgccgcgatccggcagcgcggcgcggcattccgtgaccgttgcctcgatgccaagggcagcagctgcgccaggcataaaaaaaccccgccatccaaggcggggttccgtcttcagggccgtgtcgtcgtgcccagcctcactcttcctcttcaaacggcagcgcgcggcgcggcggcggaggccgtttgccgatcgtcaccgtcaggtccgttgccttgccgcggcggatcacggtcatcttgatgtccactcccggcttgagctgggcaatcgcattgagcagcgcggtcgtgtccgtgatcgacaagccatccaccttggtcagcacatcgccgggcttcacgcccgccttgtcggccggcccaccctggaccaccgcggcgatcagtgcgccttccttggcatcgaggccgaacgattcggcgatctcgggcgtcatgtcctgcggctcgaccccgatccagccgcgcgtcacgctgccggtggagatgatcgattccatcacctgcttggccgttgacaccggaatcgcaaagccgatccccagcgagccgcccgaacgcgagtagatcgccgtattgatgcccagcaggttgccctgcgcatccaccagcgcgccgcccgagttgcccgggttgatggccgcgtcggtctggatgaagttctcgaaggtgttgatgccaaggtggctgcgacccagcgccgagacaatgcccatcgtcaccgtctggccgacgccgaacgggttgccgatggccagcaccacgtcaccgacctttacgttctcgagccggcccagcgtgatcgcgggcaggtccttgagcgtcactttcagcacggccaggtcggtttccgggtcggagcccaccaccttggcgttggccttgcggccgtcggtcagcgcgatctcgatttcatcggcgccgtcgaccacgtgatggttggttagaatgtaaccctcggcgctgacaatgacgccggaccccaggctggagaccggctcctgccgctcaggcaggcggtcgccaaagaagaagcggaaccacggatcctcggcctgcgggttgggcgagcgcttgttgccgttcttgctggtaaagatattgaccacggccggcatggccatctgggcggcttcgctgtaagacccttcggcggcaggaccggacacgttgggcacgacttccttgagcgccacgatgggcgaaccggactggaccgcgacgcgccccctctgcagccaatcaggcttgagcgttgccacgacgaaccagaccgccagcacgacggtgacagcctgggcaaagaacagccaaaagcgccgcaacatattggagttttgagcagaaaatgaaaacaaaagagcttgaattgtacttgaatgacctgttggaagtttcccgctacaaggactattgtcccaacgggctgcaagtgcaaggtcgctcggagatcacacacatcgtgacgggagtgactgcaagcctggcattggtcgatgccgcaatcgaagcgggggccgacgccatcctcgtccatcacggctacttctggaaaaacgaagatgcacgcgtggtcgggcagaagcacgcgcgtctgaagcgcctgcttggcgcggacgtcaacctgttcgccttccacctgcccctggacaaccacccggagttcggcaacaacgcccagctcgggctgcagctcggctttaccccgaccggccgcttcagcgacgaccagctcggctggaccggcacgctgcccgcgccgatgccgctctccgcgctggccgcgcacgttggtggcgtactggggcgcgagccgctggccatcggtgagccggaccagatgatccgcaccgtcggctggtgcacgggcggggcgcaaggctatttcgatgccgcggtggccgcgggtgtcgatgcctacctgagcggcgaagtctcggagcagaccacgcacctggcgcgcgaaagcggcgtggcttaccttgccgccggccatcacgccaccgagcgctacggcatccgctcgctgggcgagcatgtggccgaacgctttggcctgctccatacgtttatcgatattcctaatcccgtctgatctgacgcaaaacaaaacggccccatcggggccgttttatcttccggggtcggcgcgcatatggcgcaccagtcagcgggtcttcaggctgtcgcggatctcacgcagcagcacgacttcctcgggcggtgcggcgggcgctgcttccggttccgcggcgcgcatcctgttaaaggcacgcaccatcaggaagatgatgaaggccaggatcaggaagttgacaacgatggtcaggaaattgccgtaggcgaacacgggcacgccggccttcttcaaggcatcgagcgtagtgggagttccgggtgggggatccgccagcacgatgaacatgctggagaagtccagcttgccgatcacgcggcctaccaacggcatgatcaggtcgttgaccactgaatccacgatcttgccgaaagccgcgccgatgatcacaccgaccgcgaggtcgatgacgttgccgcgtacggcaaaggttctgaattccgagatcatgcccatggggggttctccttcttgtcgctagcgatgaacggtttcaagctcgaagcctgccgcatcactcaccggaaagcaagcaccgaagccgctttccgggttgcacgtccgataatcgcgcatggccgtggcattttctgcctatctagtgcgctggtgtctaaggtacactttatggttgacgcaaaatctaaattgacttcccctggggtttggaatgagtgaccagcaagacgtgaagagcgtggataagggtcgccgcaattggttgatcgcgacatccgtcgctggcggcgtcggaggcgtagcggtagcggttcctttcgtcagtacttttgcaccatcggagaaggccaaagccgcgggtgctccagtcgaggcggatattggcgcgctgaagccaggcgagatgatgactgtcgaatggcgcggcaagccggtctggatcatgcggcgcacggacgaacaactggcgtcgctgaagaagacggacggcgaggtggccgatcccaattccgagattgcattcaccatgcagacgcctgaatactgcaagaacgaaacccgttcgcgcgcagaacacaaggacgtcctggtcgtggtgggtatctgttcccacctgggctgctcgccgtcgggccccttcgctgccggtgccaattcccagctcggctccgatcccggtttcctttgcccctgccacgggtcgacctttgacctcgccgggcgcgtcttcaagaacaagccggctccgcagaatctcgatgttcccccctaccagttcctgaccgacagcaagatcgtgatcggcaaggacgagaaaggagaagcctgatcatggcggccgaaaaacaagtcaagacgaccggcctgctgggctggatcgacgcccgcttccccgcaacccagctgtgggaagaccacctctccaagtactacgcgccgaagaacttcaacttctggtacttcttcggttcgctggcgctgctggtgctggtgatccagatcgtcaccggcatcttcctggtgatgaactacaagcccgacggcactctgaacgccgccggcattcccgtggccttcgccagcgtggaatacatcatgcgcgaagtcccctggggctggctggtgcgctacatgcactcgaccggcgcctcggccttcttcgtggtggtctacctgcatatgttccggggcctgctgtacggttcgtaccgcaagccgcgcgagctggtctggatcttcggctgcctgatcttcctgtgcctgatggcggaagccttcatgggctacctgttgccatggggccagatgtcgtactggggcgcccaggtgatcgtgaacctgttctcggcgattcccgtgatcggccaggacctgtcgctgttcatccgcggtgactacgtggtgagcgatgcaacgctgaaccgcttcttctcgttccacgtcatcgccgtgccgctggtgctgctggcgctggtcattgcccacatcatcgcgctgcacgaagtgggatcgaacaacccggacggcgtcgagatcaaggccaagaaggatgagaacggcatcccgctggacggcatcccgttccacccgtactactcggtgcacgacacgctgggcgttgccggcttcctgctcctgttctcggccgtgatcttcttcttcccggaagtgggcggctatttcctggaacacaacaacttcttcccggctgacccgctgaaaaccccgccgcatatcgcgccggtgtggtacttcacgccgttctactcgatgctgcgtgccaccacgtcgaacttcctgccgatcctgtgggtgttcttcgcgctgctgctcggcatggtgttcctgcgcagcaaggatgcgcgcgtgaagatcggcgccatcgccgtcgcggtgatcctggccgtgggcttctacttcatcgacgccaagttctggggcgtgctggtgatgggcggctcggtggtgatcctgttcttcctgccgtggctggaccactcgccggtcaagtccatccgctatcgtcctgccttccacaagaccatcctgaccgtcttcgtggtggtgttcctggtgctcggctatcttggcgtgcaaccgccgtcgccggtcggtgagaaggtgtcgcagctcggtacgctgctgtacttcgccttcttcctgaccatgccgctgtggagccgtgtcggcgagttcaagccggtcccggagcgtgtcacgttccacccgcactgagcgaagcgaaccccgacaagagcacaaggacacaagatgaaaaagctgctttcgatcctcgcgctggccggcgcctgctttgccggcgcgcctgccatggcatccgaagggggcttcccccttgagccggcaccggtgaacaccgctgacctgtcgtcgctgcagcgcggcgccaagctgttcgtcaactactgcctgaactgccacggcgcatcgatgatgcgttacaaccggctcaaggacatcggcctgaccgacgaccagatccgcgagaacctgctgttcagcgcggacaaggttggcgagaccatgaccatcgccatgcaaccgaaggaggccaaggccttcttcggtgcgcagccgccggacctgtcggtgatcgcccgcgcccgcggtgacgactggctctacacctacctgcgcacgttctaccgtgacgacagccgcgccaccggctggaacaacctggtgttcccgagcgtcggcatgccgcacgtgctgtgggaactgcagggccagcgcgccgccaagttcacggaagtggaagagcacggcgagaaggtgcacaagtttgccggcttcgagcaactgagcccgggcaagctgagcaaggtcgagtacgaccaggccgccgctgacctggtcagcttcctggactggatggccgagccggcgcagaaccaccgcaagcgcctgggcgtctgggtgctgctgttcctgggcgtgttcactgtctttgcctggcgcctcaacgccgcgtactggaaggacgtgaagtaaaggcatgccagggcccgaatccgggcccggacaaggcaaaggccaggggtggccgctgcgaaagcagcaccgcccctggccttttctcttggaaaacctgccgaagcgggccaataaagtgcgtcatttgccactaatttgctttctggtggtcgactttggcagaatggcagaccttactgtccgaccctgcttcggctaagcccaaggaatccaaccatgatggtgttgtattcgggtacgacttgcccgttttcccaacgttgccgccttgtcctgtttgaaaagggcatggattttgaaatccgcgacgtcgacctgttcaacaagcccgaagatatttcggtgatgaacccgtacggccaggtgcccatcctggtcgagcgcgacctcatcctgtatgagtcgaacatcatcaacgaatacatcgacgagcgcttcccgcacccgcagctgatgccggccgatccggtgcagcgtgcccgcgcccgcctgttcctgttcaacttcgaaaaggaactgttcacccacgtctacacgctggagaacgaaaagggcaaggccgcggagaagaaccacgaacgcgcccgcgctgcgatccgcgaccgcctgacgcagctcgcgccgatcttcgtcaaaaacaagtacatgctgggcgaagagttctcgatgctcgacgtcgccatcgcgccgctgctgtggcgcctggaccactacggcattgagctgtcgaagaacgccgcgccgctgctgaagtatgctgaacgcattttcagccgtcccgcgtacatcgaagcgctcaccccgtccgaaaaggtgatgcgccgctaaccggcaccggcccgaaggcatccgccctcgggccactacggcgccattggaagcacaatgcctgaaacctccaccaagccctacctgattcgcgccatctatgaatggtgcacggacaacggcttcacgccgtacatcgccgtcttcgtcgacgccaacaccagcgtgccgcgcgagttcgtcaagaacaacgagatcgtgctcaacgtcagcttcgacgccaccagcggcctggacatgggcaacgagtggatcaccttcagcgcacgctttggcggcgtctcgcgcaagatcgacgtccctgtcgagaacgtgctggccatctacgcccgtgagaacgggcagggcatggccttcccggtcgaacgcagcctgccggaaacccaggccgccaccgagcgcgaaaacaacccgccgcccaagctggccccggtggaagccgagacctcggcaactaccaccgactccggccccggcgacgacgacacgccacccccggtgccccgcatcggcagcaagaagcccgcactgaaagtggtgaagtaagccatcccaaagcggaccgcaatgcagtagaatcgcggtctgcaccagacatgccggcttagctcatcaggtagagcagttgatttgtaatcatcaggtggcgggttcgagtcctgcagccggcaccagaatttgaaaacgggctacgcaagattgcgtagcccgttttgtttttgtggcaagggcgcacagccgctcaatgccgagctgatttccaagaccgagttcaaggcgcgcgccctcgagtatttccgccagatcgaagcctcgggcgagccggtcattgtcacggaccacggcaagcccacacttgaagtgcgtccctatcgcgggctggagcgcgacccccttcaggtattacgcggcaccgtggtgcgctacgacgcgccgacggagccagtggacgttgagggggaggccgagcggtgatcgtgctggataagcgtgccttattcccttactgcacccagcgcagcactcagctttccagcaaaccgcgacccatccccaaacgtcatcaccaactgccgcgtagcccgcgtcatcgccacatacatcagccgcgcttcgtcttcatccgcctcatcgtgcttatgcggcatccccgtggccggaatgcacaccagcggaaactcaagccccttgctgctatgcatcgtgattaccttgacgctgtccgcgccgggcgtaaatcgcttggtgatttggggacattcgaacggaatgcccttgcgcgtcagcgcgctggtgacgtgtccgaccgtgtcccaatggcgatagagcaccgccatttctgaccagggcgtaccagcccggttctcgtcagtcaggatctgcgcaatgcgctcagcttccgcctctacgtttggcaattcgatcagcagcggtttgttgccgcggcgcccggcaccgacaggttgcacggtaggcgcttcgtcttcggttgcctcggtcggccgcagcaactcatccgcaaagctgcgcgcgacagccagtatctcctgcgtattgcggtagttcagcttgaggatggtcgtacggcctcgggcctggatgcccacgctggcaaaggtcatcccgcgtttcctggcgccgccataaatggactgcgcatcgtcgtagagcaccaacagggaattgctctccggattcaccatctgcacgaccagcttgaaccactccggccggaagtcatgcccctcatcgatcagcacggcgtcatactggccggccgggatcgctttccggtccacgccctggatgacccgattcaccatttcctcaaacagcgcatcactggggcggcccttggggcggtcaatgttgtaagtctccaactgccgcgagcaccacgcgtggaagttatagacgtggaccttttcttcgatgcctttctcgatcatcgtcgccgccagcttggcggcgagggtcttgttgtagcaaagcacgagcactggccgtgtgacgatctttgccagatgctcagcccggtagccgaggatcatcgtcttgccagagccggcgacgccatgaatgacccggtggccttcgccaaggctgcgtgccagctgctcctgctggagatccatgacgcgaaggatgtcaggcatatccagcggctccgcggcttcctccgggaagagcgcgcgttgctccggcatgcggatctgcgggaacaggtgccagcgaatccgctcgatctgcggcaaggaaagcttgaaggtgaacttgaccgggaacatctcccacaggcgctgctggaagtgttccgcgtcgaccgactcgtacatctcgtcctggcagatcaccaggtgcggcggcaggacgtcgccgaggttggtcttgtcgaactgggcacgcgtgatgttggacaggacgacgccgcagccgtagggaaagaagggtttgcctttcagcgagccgccaggccagaccaactgcggatcgcgctgcagcaggttggtgacatagaacatgtactggcgggcttgctcgaggggattcatctcccgcaccagcccgcgatccgtcagcagcgtgacatcgcgctggtcgatttcccggatggtatccagcctccagtctttcacctccaacaccagcagaccccggctgggatggaagacgatgaaatccggatgcctggttttctctccgatggcgacgtcataccagcacaggtagtcgtcctccagctttgtctccagacgctcggcgaagcgtctctctccactggtcatgcgcgaagtgaccgaacccagcgcgggaatcagcgtggccatgcgttgttgctcttcttattgcccgttcaggagctgcgctgaccacggtaggtgtcgcggacccggtgcgacggcggtcaggcaggtttgttatgcggcaattgtaggcacaaaacggtaacggtggctatttcggtagttttggtgatttgccggttggcgacactggcgagccggcggctccgggggactgccaagcagtctgcgcctgctttccggcgatacgcgccgccgatccgtcgattcccgccacccccatatcagagcccggatcgcagtggtaacctcccgctatctccgcccccagccacccgcacgtgcaccccccagactcccgcatctggcgatccgcccccgagcagcgcgcctttgaagacgcccgccgccgcgtgcgcgcgctgcgtttcttctatatgcacgccatggtctacgtggcggtcaatgcattgctgatcggcttccatctggtgggatcgccgcatcggccgtggtctggtgggccgctcgtgggctggggtatcgggctggcgatacacggcgtgatgacgtggagtcgcgtcggcctgctcgggcggcagtgggaagagcgcaagatcgcgcaatacatggcgcaggaacaggtgcgcacgctgtcgacggagaagcagctggtcgaagcccgcatgcgcctgctgcaggcccagatcgaaccgcacttcctgttcaacaccctggccaacgtggtcagcctgatcgagcccgcgccgcagaaggccacgctgatgctggagcatttcatcgcgtacctgcgcgcatcgcttgcagccagccgcgccacgcaaggcacagtggcgcaggaggcgaagctgctgcgtgactatctggcgctgatccggatccgcatgggggaccggctgcattactcggtcgatgtcgaccccgaactcgaatcgatgccgctggcgccgatgctgctgcagcccgtggtcgagaatgcgatcaagcatgggctggagcccaagatcgaaggcgggcggctgctggtccggctggagcggcgcggcccgcgcatgctggcgaccatcgaggacgatggcatgggctttcgtccctcggccggcgctggcgtcgggctttctaacctgcgtgaacggctggccgtgctgtatgacggtgacgcccacgttcggattgaagaacgctcgcccggcactgccgtgctgatcgaaatcccgctgccgcgtgcatcctgaaacggagacgcccatgacgcccactgccctgattgccgacgacgaagagcacctgcgcgcatatctgcgcagcaagctgcaacgccattggccagaactgcagatcgttgccgaggcgaccaacggcatcgaagccgccgacgccatcgcacggttgtcgccgagcgtagccttcctcgacatcaagatgcccggcctgtccggcctggaggtggcgcaagggattgaaaccgatacgcggctggtgttcgttacggcctatgatgaattcgcgctcgatgcgttcgagcgcgcggccgtcgattacctggtcaagccggtcagcgaggaacggctcggccgcaccatcgagcggctgcgcaaggcgttgcaggaagcggcgcctttgccggaactggcacagctactcagccagctcacacgcgcccagccgcgcgcggaaagcggcggccagttgcgctgggtacgcgccagccgtggcaataccaccagccacgtgccgatccaggaagtgatgtacttccagagcgacgacaagtacgtggtcgtgcatacccgcgatggcgagcacctgatccgcacgccgctggcggagttgatcgccggcctcgatcccgaggtgttctggcagatccaccgctcgtccatcgtcaacatggaatacgtggccggaacgcgccgcgatgaggcagggcggctctttgtccggatgcgtgacagcgaagccgaactgccggtatcgcgcgcctacatgcaccgcttccggcagatgtaaggcggtcggcgtcgccactgcgccgccggctgagggattcacttgcgatccatgaattcctggatcttgcgctgttcccagtcacgcccgcggcgcgacagccgcatccataccagcaacccatgcacggtcagcgccaggccccaggccagggtggtggtcagcggccatggccagccggtggcggcgtaatgcgaccaccgcggcgacggaaagtagaagaagcggaaccacagccagccgttgacgacagcgtagaccagcaggtggatgtaccagccgcgcagggcgtgcaccatgcggcgcgcgcgccagtaggccatggcgttggggtcgtcgttgggcgggaaggcgtggtgcatgggatacctcgtgatcaagatggttggcttgcgtcaggtataggccatcgcaaagcgccgctccaggcccaagggccgaatcgacggatttcgttcgccggtgggcgcgcggatcgcgcgaatgtcggcgggtccgaccctccccccgacttgttgcagctcttgacccgtctcgccgggaatacccgcataggaaaagcccagtccttcaccataatcatagtaattatgatcataaatacgaagcgatggattccaagccgaccccgcagatagagggcagcaaacgcgtgaagcgttcggaccaggtggtcaacgatatcaagcgctggatcgtgcagacgcaccagaaggtcggagacaagctgccacaggaagcagcgttgatcgaacagatgggcgtcgcacgcgggacggtgcgtgaggcgcttgcctcgctgcaggcgcaggggctggtcaaggtcagcacggggccaaacggcggtgccacgctgacgcagccgccttatgagcgatgcctggaggcagtgtccaacttcctgtacttccagtcggtcgacatcgtcacgctgtacgccctgcgccgcgcggttgagccggagctggccgccaacgccgccttgcgcctgaccgatgccgacatcgccgatctcgaagcgctgatcgggctgagccacccggaacatggcggcagcacggactggaacgagcggcgcgaggccgacctgctgttccacgaccgcctggccgatgcctgcagcagcccgatgctggcgttgttctgccgcctgctcaacgacatcatccgccgcgtcatcgtggtccggaatgctcaggatgatttcgacgactttgatgaagagatcttccacagccacaacgcgctgattgaagccttccggtcgcgtgacccggagcgtgcgcgtgccctgatgcaggagcacatggagcatgccgaatccctggccctggaagccgaatcccgcgtggaccgcgggagcttgctgatgagcccggtcgactgatcccctgacgcgctagcgtccccctttttctgcacacccaaccgccatcgtcgcatccgacacggcgggtgggattcctattgcctgaatcctgggagccttgacgtgaaacctgctgaattgctttggcgctggagcgctgtcgatattgccgatgccgtgcggcggcgcgagatttcctgccgcgaggtcacggccagcgtgctggcccgcatcgatgcccttaaccctcgcctgaatgcgttgccggaggtgctggcagaagaggcgctggccagcgcggatgccgcggaccgccaggtcgctgagggcgcagagctggggccgctccatggcgtgccggtcacgatcaagatcaatgtcgaccaggccggccatgccaccaccaacggcgtgatcccgctgaagcacaacattgcgcgtgaggatgcccccgtggttgcgaacctgcgtagtgccggggccatcatcgtcgggcgcagcaatacggctacctattcctcgcgctggtttaccgacaacggcctgcacgggcgcacgctgaacccgtgggatgcggatatcacccccggcggctccagcggcggtgccgcgtccgcggtcgcttccggcatgggggcgctggcgcatggcaatgacatcggcggctccattcgctatccggcctatgcctgcggtgtcgtcggcttgcggccgacgaccgggcgggtgcccgcgtacaacccgtcggccactgccgagcgcagcatcacgccacaactcatgtccgtgcaggggccgcttgcgcgcagcattgccgacctgcggctcggctaccacgccatggcccgctatgacgggcgcgacccggcatgggtgccggtgccgctggaactgccgctgccgccgggaccgatacgcgtggcgctgttccggcggtgtccgggcgttcccgtcgatcccgcggtcagcgcggcgctggacagtgccgggcaatggctgcagcaagcgggctacgccgtcgaagaagccaggctgcctgacttcatggaagcggcagcgctgtggcgcacgctgacggtcgacgacagccgccgcaacatcatcgcaggcgttgaccagcatggcgacgacgccatgcggcaaagccagcgcaacatgctggacgggatgcaggagaccgaccgcgatggctttctcgatgccctggcgcgacgccaggcgatcgcacgcaactggtcgctgttcatgcaaacgtatccgctggtgctgatgccggtgtcgtggcagcgcccgagcgtgcaagacgcggatacccgcacgcccgaagagaaccgggccttgctggacgcacagagccccatgctggcaacagcgatgctcggcatgccggggctgtccgtgccgactggcatggccggcggcgtgccggtcggcgtgcagctgatggcatggcgcttccgcgaagacctgttgctgcgagccggccaggccattgaggacgcggcgcgttttaccccttatagcgacctgcaaaccggcatctagacccaggagcttcccatgaacgaacgcaaacctgcttacgccccacggctgtcgcgccgcgccatgctggccggcaccgccgccgctctgtgtaccggtggcctgctctccagggccgtatgggggcagtccgtatcgcgcatcatcgtgccgtttccgccgggagggccggccgactacatgggccgcctgctgtccgagaagctgaaagatgccatgggccgtaccgtcatcgtcgacaaccgccccggtgccgggacgcgcgtggcggccgaaatgctgaagaacgccccggccgacggcaccaccgtgctgctggcacctgtcgatccgatgttcatcgggccgctgatctacagcaatatgcgcttcaaccccgccaccgacttcacggcgatcaccgatgtgacgggcgtccagttcggtattgcagtcagcgccagctcacccatcaagacactggccgacttcgtcaaggccgccagggccaagccggctgactattcgatcggcatcagcacggttggctcgctgctgcatttccttgccgtggagttcgtcagccagtcgcgcaccggcagtacgctggtaccgtatcgcggtggcgcggcgatggtgacggaaataatgggtaaccaggtcgcggcgggcatggacgccatcacgagcttcaccgaactgcatcgcggcggcaagctccgcgtgctggccgtggcaggggaaaagcgcgctgatgccttgccggatgtgcctacgtttgcggagtctggtttccccaacctggtgacctcgtcgcgctacctgctttatgtccgcgccaacacgccgcccgacgtgaccacgcagtggtatcaggccgtgcgcaaggtgctggccatgccggatgtgcgcgaaaagctcgcgcgcgctggctatgacatcttgccgggcggcactgctgatgaggttgccaggtatgcgagcgcgctttcggcacggtggacgccggtgatcaaggcgtcgggtttcaagggggattgagaggaatttcgtagccgcaccccaaactcggctggagacgatttccatttgtgtcagcttgctggagaattcccgcggcaccctcctcctgtagggtgccgctttgtattaagcatgtctgtcccagtgtcgtaattggcctcagaagacaacctgggcggcgccaagggaaagtgccaatggcgccgcatcgtgccgactggcgcaattgctgtggctcgcagccgctcaggctgcgagccatacacccgagcgtatccagccatgacctccttctctttccgcgcccgccgcctgtggctcgccacaggctttggcctggcactctccgcctgcgccccgatgatcgcgaccaccccggcaacggtggagctcatgcagccagccgccacggccaagcgcgtccagcttctggcgccggcgcaggtcaagctcgacaccggctattcccgagacctcgctgccaggtcgacctggtcgcaggtcgggcgcctcccgcaaggcgatgtttaccgccccatcggcaccattctcacaatcgagggccgccatgttcacgaggcctacctggtcgtccgcaacaagacgctggtgggcttctatctgcctggggagcagaactactccccgctaacgacagcagtacctttgaacttgggagaatcggaatgaaacgggttgcgcgcatgctgatcgccggactggcggtgtcatcgctgctggcgggatgcgcttcgggcgtgaagcacgccgagatggcggcatcgatgcccacgctgaagccgggcgagggtcggatttatttcctgcgttcggcgtcgatgttcggggcggccatccagccggatatccgcctgaatagccaggtcgttggcgaatccaagcccggcggtttcttcttcgtggaccgcacggctggcaagtatgtcgcggcggcctcgaccgaaaccgagaagacactcagcttcgtgctggatgccggcgagaccaagtacgtgcgcagctcgccgtcgctggggctgatggtgggccgcgtggtgctggagctggaaacgccggagaaggcgaaggaagagctggcgtcgctgagctacacgggggaccaggtgaagactgcggcgaagtaagcggattgattcagccgcgttgcaggctgagtcgcgttgacgacgccggtgcgtcgtcaattgacgcatcggaattccgcatggcttgcggctcagcgcgggcctatcaacgtaggcggggcacctcctcgtgatgttggcaaagcagggttgcgccaccctttttattgtagtaacgtaactacattgaagttgctaggagggtcatcatgacgatcacaaccctatcgagccgagaactcaatcaggacgtgacaaaagccaagaaggcgacgaaggacggtccggtcttcatcacggaccgcggcaaaccggcgcatgtgctgttgagcttcgaggaatatcagaggctcacccagcagcgtcgcaatattgcagatgcactcgcgatgcccggcattgaggacatcgagttcaatccgccacgtgccaacatcaaattccggcccgctgatctcacatgatgttcgtgctcgataccaatgtcgtttccgaactgcgcaaggtccgagccggtaaggctgatgcaaacgttgcagcgtggtctgccagcgttgatgcagcttggctctttgtgtcggcggtcaccatcatggaactggaaaccggtgtcttgcaaatcgagcggcgggatgcccgccaaggtgcgctgctgcgggcgtggctggaccaccatgtattgcccgaattcgcaggccgcgttttgcccattgataccgccgtggccctgcgttgcgctcggctgcacgtaccagaccggcaatcggagcgggatgcgttgattgccgcaacagcaatcgtgcatggaatgaccgtcgttacacaaaatgtcgccgacttcatggcaactggcgtgagcgtcctgaacccttgggacgcctgatcgtgagccgccgtcttttcccaaggagcttcccgacatcacagtcatcaagccgggaagccatccccgttaagacgcaggcagctcatccgccaacacactctccagctgcgccttcaccagccccaacaagcaaaatgcactaaagcagccctcgaattgcacactctgctgttccagcagggtaagcacaccatccataccagccgagactgactgaaggctgtaccgcgccgtggatagatcgatttccgactaggacctcctatcgttgagtgaaggtccgccgcacgacgttagggaagggcggcgggcctgacgacgagggtggaaaccggtgccacagccattgccggtcagccttgcggctgcctcatccggcccgccatagatggcttgcccgtataggcaagaacggtcgtcagggacgaccgtccggctgctgacattcgggtttccacacccggtcaccgttgtgtgcgatgaccgtgtcagtctcacgcgtcagagccaacaactcgataagacacttcgcattcctacacggacgccgcatcctgcccgagccacgcccgccagcaaatagccaaacgcctaaaccactcgcctcaatccaccagcgtcgccaatgcctcccgcgcctcccggcgcagcttctccagatccagccccacgatcgcgccatcacgcaccacgtgccgcccgcgcaccagcacatcccgcaccggcgtaggctcgccagccgccacaggcgcagtgccgatgtcatggaagccatggaaccgcagcccgctgacgtcatagatcgccaggtcggcagactgccctggcgcgagcgtgccgatacccggcagccccagcacctgcgcaccgcctgcggtaccccagtggatgacttcctccacgcgggtttgcgcggccccgcccagcgcccggtgcaccagccacgcgaaattggcctcatgcaccatgctgcccgattcattggacgccactccatccacgcccagtgaaatcggcacgcccgcatcggccatcgcgcgcactggcgcaatgccgctgccgagccgcgcattgctgacggggcagtgcgccatgccggtgttggttacggcgagcattcggatctcttcgggattcacggtgaccaggtgcgcgaaccagacgtccggccccagccagtcgtggtcggccacgaactgcaccggcgtgcactggtacttctcgcggcagaacttcacgtagttgtcggtctccgacaggtgcgaatgcagccgcaggtccatgccgcgcccgaaggcggccagctcgcgcagcagtgcggggggcagcgaaaaggttggcgtcgttggtgcgaccactacgcggcgcaggccatcggccgaagcgtcgtgatagcgcgccttcagtcgctcgatatcggccagcatctcgtccagcgtctcgggcaccagcgcggtggcgcgcatacccggatgatcggaggctgactggatggcgccgccgcggcacagcaccaggcgcatgccaagctcttccgctacctcgaacagcacgtccccggtctccgccccattgccgtggtgatacaggtagtggtgatcggcgcaggtggtggtgccggacagcagcagttcggccatgcccagtcgcacggcggtacgaaagatctccggcgtgaagcgcgccaggcgcgggtaggcgacggaggccagccattgttccagccccacgttcatgccgctgggcacggccttgagcaggttctggaacaggtggtggtgggtgttgacccagcccgggtagaccacgcaaccggtggcgtccagcacagtttcgtcgccctggcgcagcaggcctgcaccgatctcggcgatgcggccgtcgcggatgcggatgtcggcggcgcccgctcgcgcggcattgccggtgcggccggtcatcacggcggcggcgttgcggatcagaaggccgccggcgggcgcggcgctggtggcgttggtgttctgcaccatgtttcagaccccttggacgttgtcggcactggcgggcagctcgtcggcttcacgggcgggcacgccgttgagaatcaggttgagcagcacagagaccacgcaggcgatgatcacgctgctgtggacaaagggctgcaggaagccgggcagcttctccagcatgccgggcagcatcacgggcatcatcgcgcagccgagcgtgatggagacgatggagaggttgttgggattgcggtcgtattcgacctctcccagcgtcttgatgccggcggccacgactacgccgaacatgaccatggttgcaccgcccagcgccgcggccgggatcgaggcaaacagggcgccgatcttgggcaccagcgctacggcgcacagcatcgcgccgcaggtggccactacccagcggctgcgcaccccggtgacgatgaccaggcccacgttctccatgaaggcgatatacgggaacgccgcgaacatgccgccgatggcgctggccaggccgttggcacgcaggccgcgggtggcatcgcgctcggtcagggggcgcttgacgatatcgccgacggcgatgaacaggcccatcgattccaccatctgcaccaccatcacgatcaccatggtggtgatggcgcccacgttgaaggtgggcatgccgaaggcaaacggcgtcaccatggtgaaccacggtgcgcgcgcgacttcgtcgaagctgcccatgcccagcatccacgccaccgcgccgccgaccagcaggccgatcacgacggacaggttgcggatcagctcgccgccgtgccggttgatgaacaggatcagcgccaccacgccgaaggcaacgatgaaaaaaatgggggcgccgaaatccgacgccccccttccgcctccaaaccagtgaaacgaaaccgggaacagcgacaggcccaccgcggtgatggtgcaaccgctaaccaccggcgggaagaagcgcttgagcttgccaatgatcggcgcaaggaacatcgcgattacgcccgcggcgatgatggcgccgcagacgccgttgaagcccagcgacggatcggcgccaatggcgatgacggggcccactgaactgaatgcaacgccctgcatcagcggcaggcgcacgccgaacttccagaagccgacggtctgcagcagggtggcgatgccggaggtgaacagcgcggtgctgatcagcatggtggtctgcgccggcgtcatcttgagtgcgccggccacgatcatcggcacggcgatggcaccgagataactgaccagcatgtgctggaagccgagcgtcgccatggcgcgtgccggcaggacctggtcgacggggtgaaccgctgcttgcatgatgttgtctcctgccgcgtgctgggggaaagtgcgccatgccggcggcggctggcccggtctgttggttgccgggctcggtccgtcacggtgccatgcgcggcgcatggccgacgcatgccttgcacagtagtgatgcacggcatgccgtcatagcgctattgcgaaggccctggcaccgggccgcaatcgcgcttgcaaaatgcgcgcccggggcatcaggggtttcccttgggttgcgtgagggcgggggtggtcataggatggatgcgcttcttcattgctatccgaatgcgccggaagcgaagacgtattcccggcgctttccaccattttcccaacgccatgtcacccaccgcaggatggtctgctgctgcctcccgctcgccagtcagccgcggcggtgacctcgaccgcatccagtctctgtccggccgcgtgttcggtcccacgcggctgcgcgcgacggaggccgatgcggcgctcgatgcccgtatcgacaccagcaccatcggccggctgacgctggtcaccattgcctacaaccaggcagtgcagatcgagccgcagccgaacaaggatgagttcgtgatccagaccgtgctggcgggtacgtgccgcgtggagaccccgcgcggtgcgatgctgatgccgccgggggcgacctttgtgttctcgcccaccgtgccggccacgttgtcgctggatccgggctgcgagcgcttcagcgtggtgatccgccggcagctgatcgacgaggcgttccgccagcagttcagcttcgagccgccggtgccgattgaattcgacatgcagccggtggcggacgatggccgcgccgcgcgctggcaggcgctggtgagctacctgcgcgcggaaacgcgggtgcggcgcgaaggcagcggcgtgccggcggtggacggcagcatcgagcgcatcgtgctgtcgacactgctgctcgaccgctttgccgcggacggcaatatgctgccgcgccggttcgaggcggtgctgcctgactatgtgcgcaatgccatcgcctacctgcgcgccaatcttgaacagccgctgacgctggagcagatcgccgcacattgcggcgtatcggcgcgcaccttgcagctgggttttcgcaagagcaagaacaccacgccgatggagtacctgcgtctgctgcgcctgcatggcgcacgcgccgatctgcaacgggcgcggcaacagaaggggatggtcagcgcgattgcgctgcggcacggctttacgcacctgagcctgttctcgcgcgagtaccggcgcgagtttggcgagctgccgtcgcagaccttgcgggcggcagcgcagcaggggggctgacggcgagccggccccctgttgctcaggaccttcagcactcagatcgtgcccgccgccaccagtgcctcgatctctgcctcgttcatgccgagcgacttcaggacagaagcagagtgctcgccgactgccggaacattccccatggaagccggtacgcccgacagcgtagccggcggcagaagtgcctggatggcgccacccggcgtctggacttcccgccagcgattgcgtgcggcaaattgcgcgtgctgccaaacatcatgcatgtcgttcaggggcgagttggcaatgcccccgcgatcgagacgtttgaccagctgttccccggtcatggagcggagatgactggcgatctcctggtccagcgccgcgcgattggcgacgcgttggagattggagttaaagcggtcatctgccgccagggccgggtcctccagcacctcggagcagaaccgctgccattcccgttcgttctgcagcccgaagatgacgctggccccatcgccggtctggtactggccatagggggcgatacccggatgcgcaacgccgttgcgtgccggcggcgtgccgccatagtgagcaaagttcaggggatatgacatccattcgctcaacgcctcgagcatggtgacttcaacccggaggccggcgccagtccgtgcgcgttgcagcaaggcggacaggatgccggtataggcgtacatgccagcggcaatgtccgcgatggaaatgccggtgcgcgacggcgcagcttccgtaccgcttaccgagatcaggcccgcagcggcctggatcaacaggtcataggccttcttgtcgcggtatggcccgctgtcaccataccctgagatatcgcagacgatcagctcaggatagtcagcatgcaatgactcgaagtccagtcccatgcgttgggcggctcccggcgccaggttctggatgaacacgtccgcttcggcgagcagcttgtgcacgatcgccttggcctcgggcttcttgagatccagcgtgaggctttccttgccgcgatttgcccagacaaagaacgacgactggccgtgcacggaatggtcatagtcgcgggcgaaatcgccaacgagcgggcgttccaccttgatgacgcgggcgccgagatcggcgagctggcggctggcgaagggcgccgctacagcgtgctcaagcgccagaacggtgatgccatcaagggggcgtaggctgggtttcatggagggagaatgaagggacctggcggcacacgggccggacgacaaagtataggaatggtcctcttcccccgaacagtcgagaattcctaaggcggcttcgaagtcttcgaaactggccgcatgcctgcccttagggcgcagcgtccggtgcgccccattcggcgacataccggataaagtcccgcgtataggccgggagcgccttctggctccgcacgacaatccgctgctcgcgccgggcccatggctcatccagggtgaccccttccaccaccccttgctcaatcaggggacccgctacggaacgtggcacgagggagatgccggcgccttcctgtacgcaacgcatggccgcggcaaagtcgggtgcatgcacgcgaacgcgtggcttgatgccggcacgcgcggccatgtcattgaggaagaggaaattgctgctcttgctgccgacggataccaggtcgtaagccaatgcctgtgcaagggacatcttgtcgagcagcccggacgggtggcgtgccggaaccacgaacatcaactcatcgacgccatatcgaatgaactccaggccccgcatatcgatcgcgccggccaccagtccgacgtccgcccggtcctcgatcactgcccgcacgctgtcctcgctgaggtgctcctccaggtcgacattgacgttcgggtacgccgccaggaaccggctaagcgccgcgggcaggctggccatggtgctgctgttcgcgtagacacggatatgcccttcaatgccgtcggtatggcgccgcatgtccgactgcaagcgttcgacgttctccatgatcgcctcggcatagtgctgtaccgtctcgcccgccggcgtcagggccatgcccttctgcgtcctgttgaacaacgggacgcccatcgcctgttcgaggttcttgaggcggtagctggccgaaggcgccgtcaaatgcatatctgacgctcctgccgtcacgctcttggcctgcgcaatggcgaggaatactcgcagatcggtgagttcgaaacgcacgcttgtctccgttgcccgacagttcctggggatgtttagaggaattctaacgacaccccaggagctttcgactggtgtccttgcagggtccgattctatatttcggctcgtcacggcagctaccgctgtgctatgcgagaaataatcggagaccaacatgactatattcttccgcaggatcgccagcgcgctgggcagcgccgcgacactcctggcctgggcgtccccgtcagtggcgcagacagactacccggtgcggcctgtccgactcatcgttccgtaccccgctggcgggccgacggacaccttcgcccgatcgctggctgcaagctggggccgcaagctgaacacctcggtggttgtcgagaacaagtcgggggccggcacgatagtcggcaccgagctcgcggcgaaagcggcaccggacggctatacgttgctgctgaccactgtcgcgcatgccgtgaacccaagcattcacgccagcctgccgtatcgcacgatcgaggactttgcgccagtcgggctggcggctcgtgcgccgctggtgctggtcgtgaacaagggcgtcccggcgaaaacactgccggaattcttcgcttatctgaagtcgcgtcccggccaggtcaactatggctcagccggagttggcagtgccccgcatctcgccggggaactgctgaactacacggcaggaacgaaagcggtccacgtcccatatcgggggagcgcgcctgccatggccgatcttatcggtggccatgtcgaattcatgatcgacagcgcaccgacagggctggcgcaggtgcgcgcgggaacggtgcgattgctgggaacgtcgatgggaaaacgcctgccgcagaccagggagacgccggcgattgcggaagccgtgtcaggctatgaggcgtacacctggaacgcggtattcgtgccagcccgaacaccgtcggcagttgtccagaagctggtctcgacacttggcgatgcactcagcgatcccgccctgcaaagcaaagccttcgaactcggattgcagctggagacgcagcctacaccagcggggctcgaccagttcctgcgcgcggaactggagaagtggaagcgggtggccgtcgccacgaatatgaaagccgactgagcgaaacccgcgcaggccagcgccggaaccaaccatcaggaatacggagaagccatgaacgcctatcaactttgtccgcaacgctactttgaggatttcgaactcggagagcacttcaacctgccgtcccgcaccatgaccgacgcgctgttcgcggcgttccagctggcaagcggggacaaccatccggttcactacgacgtcgagtactgccgtgctctcggcatgccgcacatgctggcgcacggcttccaggtcgtgatccagactgccgcgggggcgggcctgtttccccatatggtcgaggagtccctgaagggctttatcgagcagagcagccgcttcctcgcgcctgtctatgtcggcgatacgttgtactgccgcctcaccgtcaccgagctggttcccggtcgtacgaccggcgtgctggcgatgcggtcggaggtgcgaaaccagaacgacgtctgcgtcatggagggtacgcaaaggtacttgctgcgcaagcgtgtgccgggcagcagcggggactgacgggaggtcagcctccgctgccggtcaggaccgtcaggctgcctgggccacgggcaggcagaccctcagcagcgtctgcaagcgcagcttgtcgaggtgccggccgataaatacgaacttgctttgcgcggcctccgcgccccacgcatcggcgggatgaaaatccatcagccggtgcacggcttgcagcacgtagcggcggtcatcgccctccacggccacgatccccttcatccggaacacatcgtccccttgcgccgcgagcagtgccttcaggccgtgctccaggcgctggcggtcgaacggctggtcgaacaccagcgatacggacgtcaccgacggatcgtggcggtggccgtgcgcgtcgtcatcgtgcacgtggtcgcaatgctcgtcgcatacgtggtcgtgatggtcgtggtcgtgcgcatgttcgtggtggtcagcgtgcgcgtccgcctggatcgtgcccgtggtaaagccgccgatgccgaggatcttgcccaggtccacctgtgcaaagtttgagcgcaggatctgcgcaccctcattcaggcggtggatgcgtgcctccagcctgtctagctgcgcggcgttcaccaggtcggtcttgttgaggatcacgcggtcggccgccacgatctggtcgacggcctggttgtcgaagccggtcagttggggatcatcgaggtggctctcgatatgcaccgcgtccaccagcgtcaggatgccgtcgagcgtgacctgcttggcgacttcgttgtccatgaagaaggtggccgccaccggcgtgggatcggccaggccgctggtctcgaccaggatatggtcgaagcgctcgggctgctccagcagcttctgcaggatgcgcacgaggtcggtgcgcacatcgaccacgcagcagatgcagccgttggtcatctggtagatctcttcgtcggaggtcatcaccaggtcggaatcgacatcgacctcgccgaactcgttctcgatcacggcgatgcggtggccatgcttctgcgtcaggatgtggttgagcagcgtcgtcttgcccgagccgaggaagccggtaaggatggtgaccgggacgggcggttgttgtgcgacggcaggtgcgttcatgttgtctcctgattgggtactgcgttccccgctatcgcggggcgaaagttctctagttctcttcaggcggtagccacgttggggcgcaagccttgccagcgttccaccagcccgtcgtgcggcacgtcgaacaggtccagcacgcgccccacggtgtggttgacgatgtcgtccactgactgcggatgtgtgtagaaggccggcaccggcggcaccacgatggcgcccatctcggtcaccgtggtcatgttgcgcaggtgcaccaggtggaagggcgtctcgcgcgccagcagcaccagccggcggcgctccttgagcatcacgtcggcggcgcgggtgacgaggttgtcggcaagcccggtggcgatggcggccagcgtgcgcatggagcacggcgccactaccatgccgtcgcagcggaacgagccgctggcgatggtggcgccgatgtcgcgcacgttgtgcaccacgtcggccatggcttcgagctgcgggcgctgcaatcccagttcatggtgcgcggtcagcaggccggacggcgagcagaccaggtgggtctcccagccgtccagtgccgacagtgcctgcagcacgcgcacgccgtacaccgcgccgctggcgccggtaatggccaccaccaggcgttgcttgcgggtcatggggtggcgccttccttcgctgccttctcagccagtgcctgcagcacttgctccggcttgatcgggtagtgccggaagcgcacgccgatggcatcgaacaccgcattggcaatcgccggcccgatcgcgacgatcgggtcctcgcccacccccttggcgccgaacgggccgccggggtcgggggccgcttccaggatcaccgtgtggatgggtggcatgtccatcgccagcggcatcttgtagtcgacgaagttggcgttgagcgagcgcccggtgcgcatatcgatctggtagtcctcatacagcgtatggccgatgccttgctggatgccgccttcgatctgccctgcggcagccaccgggtggatcaccttgccgacgtcatgcacaggcaacacctgctgcacggtgatgaagccggtttcggtatcgaccgccacctcgacaaaatgcgcggcgaatgaatacgacttggtcgggtgataggtggcggtgcccaccagctgcgcggcggggatgcccttgcgcggcatcacggcctcgcgcacggtcagggtcgggccgtcgcggtcgcgcacggcgatcacgccggcggtcagtgtcagggcctcgggctcgcattccatcagcttggccgcgcgatcgaacagctggcgcttgatctcgcccgccgccatctgcgcggccttgcccaccatataggtggtgtggctggcaaaggcgccgatgtcccagggcaccacgtcggtatcgccgtgcacgaccgccaccgcttcgaacggcagggtcagttcttctgcaacgatctgggcgagggcggtatgcgcaccggtacccagcccggccgcgccggtcagcagcaccacggtgccatcctcgttcatcttgatgatggcgttgccctgctccttgatgccgggataggcgctgctgccgtgcatttcgcagcccaggccccagccggtgcggatcgggccgttggtgtcgcgcgggcgccggcgcagcgcgggccagtcgaccagttccatgcctttctcgatgcaggcctccaggccgtgcccgatcagcggatggttggacggcgcaatgtcgccttcgcgcacggcgttcttcagcttcagcccggcggggtccaggcccaggtgctcggcggcctcgtccatctgcacgtcgagcgcgtaataggtctggaccacgccatagccgcggaaggcgccggcgatggggctgttggtgtagacgcagcggccttcgagcaacacgttgtcgcagcggtacagcgagaccatggcggcggtgccgacattggtcacacccgggccatgcgagccataggcgccggagttgaacaccactttggcctggcgcgcggtgatggtgccgtcgttgcggaagccttgcttgagccagatcttcgccggatggcgcgtgcgcccgccgaggaaggtttcctcgcgcgtgtattccatgcgcaccgggcggcgcgtctcgcgcgccagcagcgcgcacaggaactcctgctggaataggtcctgcttggcgccgaagccgccgcccatgtggtcgaccagcacgcgcaccttgtgcagcggcaggcccagcacctcggccatgatgccgcgcaccatgaaggcggtctgggtggagatccacaccgtcaggttgccgttgccgtcccagctggtggtgcagacgttgggctccatgtaggcgggggtggggcggccgccttcgtagatgccttcgaggatgaagtccgcctcggcaaagcccgcttcgacgtcgccgcgcttgatgatcaccggcggcagcaccaggttgccgccgggttcgcggtcgtggatgcgcggggcgtcggagcgctcggcgtcctcggtggtgaagacggcgggcagcgtttcgtactcgacttcgatcagctcgaccgcgcgctcggcgatctcttcgctgatggcggccaccgcggcgacgccttcgccccagtagcgcaccttgtcgtccaggatgtactggtcgcaggtcaccgaggcggagcgcgggtggggcgagccggcgtgcagcacgcgcggcacgttctcatgggtcagcacggctttgacgcctggcaatgccagcgcacgcgaggtgtcgatgcggtggattttcgcgtgcgcgaggttgcagcgcttcatcttgccgaacagcaggccggggaagggcatgtcggcaacgtatctggcgttgccggtgaccttgtcgagcaggtcggtgcgcttgacgctgtgtccgatcacggcgtgggtcatcatgcctcctcgctggcgcgggccttgcagcccgcgaattccatggcctcggcggtcctctcgatggcctcgatgatcttggtgtagccggtgcagcggcagatattgccggcaatggcaaagcggatttcgtcgcgcgtgggacgcgggttctcgtccagcagcgccttggccatcaccacgaagcccggcgtgcagaagccgcactgcgcggcgccgcactgcatgaactgctcctggatcgggtgcacggtgtcgggcgcgggctgcacgccttcgatggtggtgatgtggcagccgtgcgcttcgggcgccagcaccaggcaggaattcatcggctggccgtcgatgatgacggtgcatgaaccgcattcgcccacgtcgcagcccttcttggtgccggtcaggcaggcgtcgttgcgcagggcgtcgagcagcgtgccgtgcggttccaccgccagttcgcgcggttcgccgttgatgacgagttcgattatctttcgcatgttgcggcctccagggcttgttccagggcgcggcgggtcagcacgctgaccatctgccgccggtaggcttcgctggcgcgcacgtcgctgatggggcgcgcttcgcccatggcggcgtgcgcggcctgcaggaccagggcgtccgtcacgcgctggccgcgcagcacctgctcggcacgcacggcgcgtaccggggtcgggccgaccgctgccagcacgatgccgacctcggcgcagtggccgttctcgactgtcagtgataccgccacgccgacggtggccagttccatctgcacgcggcggccatgcttgaggtagaccttgccggtgtgggggcgcggcgccggcacggtgatgcgggtgacgatctcgtccggcgcgatggcggtcttgccgacgccggtgacgaagtcctcgacgcgcagctcgcgcgagcctgacaggccatacaggtgtaccgaagcaccgtccgccaccagcggcgcgatcgaatcggccgacggtgacgcgcggcagacgttgcccaccacggtggcgcgatggcgcacctggattgaggcgaagtccgtcacggctttcgccaggctggcgtaatggcgctgcacgaagcccgaggtctccaccgcgcgcgtggtcaccagcgcgccgatgcgcaggccgttgacggggtcgaacgtcagcacgtccatgcccgggatcttcttgatattgatcacctgctcgggcttgcgcacggactccttgatctggaccagcaggtccgtgccgccggccagcacgctggccttgccgccgcaccggtgcagcatggccgaggcttccgccagcgttgccggttcgaaatattcaaacgctctcattgctcctcctggtctgtgccatcggcgtctgcctgtcgtgtggggcgcgcaccgttgaagtcatcatgggcggatgggcttcatcggtaaagacccggaaacggattaattgatcgtgttaccctctgaatcagacgcgccggccaatctggcaagacaagtgcgcaccccgacatcccggaggtagacaacgtgccaaacatcagcaacatgaacgtgtcgctgcgccagctgcgcgcgttcatcgccgtggcgcaggagcgccacttcacccgcgcggccgagaagctggacctgtcgcagtcgtcggtcagcgcgctgatccacgagctggaaggcaacctcggcctgaagctgttcgaccgccacacgcgccagctgcacatcacgcaggcgggcgcggagctgctgccgctggtgaagaaggcggtggccgatatcgacagcgtgatcgagaactccagcgagctgcgcacgctggggcgcgggcgcgtgtcgatctcggcgtcgtcgatccaggccgcgctgatgctgccgcgcgtgatccgcgagttctgcgtgagccatcccggcgtgaaggtggaactgcacgacgtgtccgagcatgaggtgaccaagatggtcagctcgggcgaggtggatttcggcatcggcaccattcccgagggccagcccgacctgagcgcccaccggctgatgtccgatcccttcgtgatcgtgatgccggcgcatcatccgctgcggcggcgcaagacgctgcgctgggaagacgtggcgggcctgcccgtgatcgggccgcacaagggcaacccgatccgcgactgcctggataccgcgctggccgcgcgcggcatttcgctgcagcgggtgcacgaggtgttcctgccgctgaccatggtgggcatggtggatgccgggctgggcatcgcggtgatgagcgcggcggtcacgcggctgacttccgcgctggggctggccacggtgatgccgaccgatccggtgatccaccgcgagatctcgctgctggtgcacgcggaccggtcgctgtcaccgccggcccaggctttccgcgacctgctcatgcgctatcgcgccaagctggccgacgcagcctgactacgtcatgccggctccttcgccagcccgtgggcctggggggccggcgagcgggcgttgaacagcaggttcagcagcaccgcggtcagcgtgccgagcaggatgccgttctggcagaacttggccagcagctccggcatctgcgcgaagaacttgtccgacaccagcgggatcatgcccagcgctacgctgacggcgacgatataggcgttcttcttgttctcgacaaagtccacatggccgaggatgcgcacgccggtggcggccaccatgccgaacatcaccagcgcggcgccgcccagcacgtattgcgggatcgaggcggcaaagaaggccagcttgggcaggcagcccagcacgatgaggatgccgccggcggtggcgcagacccagcggctgcgcacgccggtgacctgcaccagccccacgttctgcgcgtacgaggtgtaggtgaaggtgttgaacaccgctcccaccagcgcgcccacgccgtcggcacgcaggccgcgcgcgaggtcgtcgcagcccaccgggcggcccacgatctcgcctagcgccaggaactggcccacgccctcgatcatgatcacgatcatcaccacgcacagcgtgaccgcggtcatggcatcgaaggtgggccagccgaagtggaagggcgtgatgaactccacccagtgcgcgttgtgcaggccgtcgaagttgaccttgcccagcgacagcgcgatcacgaagcccaccgcgatgccgatcagcaccgccacgttgcacaggaaacccctggcaaaggccaccagcgccagcaccgtgcacagcacagcggtggcgatggcgatgttcaccggcaggccgaagttgggattgggcacggggccggccgccgtgttgatggtcgggttgccgcccgccgcccagttgatgccgacgcgcatcagcgagacgccgatcaccagcaccaccgtgccggtcactaccggcgggaaccagcgcaccatcttgccgacatagggcgcggcaatgtaggtgaagatgcccgccaccatcaccgcgccgaacacggccggcaggcccagcgacggattggagccggtggcgatgatcggtgcgatggcggtgaaggtgacgcccatcatcaccggcaggcggatgccgaccttccagatgccgatgctctggatcatcgtcaccaggccgcagcagaacaggtccgcggcgatcaggaaggccacctggtccttgggcagcttgagggcgccgccgatgatcatcggcacggcaatggcgccggcatacatcaccagcacgtgctgcaggccaagggccagcaggcgggtcgggggcaggacctcgtcgacgggatgcacgggggcattcccttgcgtaggcagggtggaattcatactgtctcctttggtcggtaccacgccggtcgcgcattgcgctcacgtgtcgccaaggtcgccggcagtttcctttccgggatggtcagtggccatccttctcgtgcgatgcccgcgcctgtcctgtcttgtcagtccagcatgacagcggcggcgggaaggtacaacgttcgcggcggatttatcgatcgggtgaaacgatgagtccgccagtttcagcgggttatcccttacggcacgtgggagcccgcgcgttccagccgcttcagcagtgctgccgcgcgctccatcgcggcagggtcgatgcgagcgcggataccgtcgaaggcaggtccgcgcgtggcgtccagtcccatgcgtgatgtggtgcccacacccgaggccgaggggtcgagtgcgctgccaggcaggccgtcgaccaccaccacgtccaggtgcggttgcaggtgcgtggccatcgcccacagcacttcttcatcgcgggtgatgtcgacgtcctcgtccaccgcgaccaccgtcttcaggtacggatcccagccgagcaggcccagcatcacctggcgcgcctcgcctgggcggctctggcgcagcgccacgtaggcgtggaagtgcgtaccggagctggggtagtgcacggcggtgacgccggggaagcgctccctgagcttgtcgaccatctccgattcgcgcgggatgcggcccaggttcaggtgttcggccgagttgccgccgaccacgtcgaccagccatgcatcggtgcggcgcatcacgctttccacgcgcagcaggttgttggtcgagcggtccgacgaatagccggtgaattcaccgaaggggccttcgtcgacgcgcgcgtcgggatcaatcacgccttcaagcacgatctccgcatgcgccggcaccaggatgccgtggcgcggcgtgcgtaccgcttccagcggcgcgccgaacaggccgccggcaacgtggcgctcgtccacgccgtagggcagccgcgcagcgccggccagcatgaacagcggatgcgcgccgatcaccatggccaccggcagcggccggcccagttcggtggcgcgctgctgcatgcgccacaggtgcccgcgcgaatgcaggctggtggcgatctcggtcggcgagtgcagcatcgagcggtggtagctggcgttgccgatgccggtgtcggggtcttccgcgatcaggatcgcgttggtgatgtatgggccgcggtcggtggcgaagtgcttgatcgccgggatcgtgcgcaggtcgatgtgttcagtctcgacatggccggtgacggcgccgctgtccagcacgcgcggcgccaccatgcggcggctgcgggtctggtattcgccatggatgccggcgggcgccacgccgcccagcatgcgccccacgcgctcgcgcgaggcgaagaggttggtcgccagcgacgtgcccagcccttcgacatggtcgaacagcaaggccggatggcggccctgcgcggccagcgcccacaccagtgcggtcgggtcctggtccgcgccgaccggctcgcggatatgcagcacgtcttcgggaaaggcctcgcggtaggcggccaggaactggtggaagtcctgcgaggtgtcgtgaaagggcttgcgcgccgatgccgctgaggcgaagggcgctgagggtgagttcatggatcggctcctgtggtcagggttggccagggcgaaggctgccccggcggccgggagtgctcccggccgccgtgccgtgcctgcctgccgaacagctagcgactacatgtcagcgcgtgctggcgtacgtatccttcagccgcgccaatgcctcttgctgcgtcctgggcggcgccgtggtctcgatgccgaccagccgggcgatgttgttgcccatgtagtcctccagcccgtcctcgtccaggtccatgccctgcggcgcgggaccgcacagcatctccagctcgcgcagccacatgccgggctcgttgggcggggtgtcggtgccgaacacgatcttgtcgcgcggcagctggcgcgcgaactcgacgatgcgcgactggaagcaccagcccgattcgcaatacacgttgggcgtgtccattgccatccagaaggcctcgaacgagtagttgccgccggtctggatgccgaagtggccgatgatgaaattgaccatcgggaattcgcggatgatcgggtagaacatcgtcgggatggtgtacgggccgtcgccggtgtggatcagcaccaccacgttgtacttggcgcagaccttcatcgccgggcgcagccagtccagcgcgcggtcggggcggtagccgtgcatgttggcatgcagcttgagcatcttgaagccgtattccttgacgtggaattccagctcctgcgcgccttcttccgggccccagcgcgggttgaaggtgaagttgccgataaagcggtcggggtacttctggcagagctccgcgatgtaggccatgtagtcgcggatgccttcgcgcccgcggcggttgccgtcgcggtagccggtgttgcccggcggcggctggataaagcccatgtcgatgcggcgcggcttgccgttgatcatgtaggggccgtccatcatcttgagcatgcgctcgccgttgaagggctcgccggtgtggcgccaggcctcgtcgacgagattggtcgggtgcagatgggtatcgataatcatgttgtgtgctccggagtccgttgtcggtggcgcgggcctgtgcgcttacgcggccaggcgtgctttcgcttcttcgagcgtgcgcgggaccggcgtcggttccaggccgatcatccgggcgacgttgttgccgaggtagtcttccagcgtgtcttcatccaggttcaggccctgcggcggctcgaagcacagcacttccagcaggcgcagccacatgccgggctcgttgggcggggtgtcggagccgaacaggatcttgtgcttgggcagcaccttggcgaactcgacgatgcgcgactgcaggcaccagcccgattcgcagtacacgttgggcatgtccatggccatctggaacggctcgaagcaatacacgccgccggtctgcacgccgaagtgggccatgatgaagttcaccgtcgggaactccttcatcatcggcacccattcggtcgggatgctgtaggggccgtcgccggtatgcagcttgaccagcacgcccagctcggcgcacttctgcagtgccgggcgcagccagtcgagggcgcggtccgggcggtaggcatgcatgttggcctggaactggaccatcttgaagcccagcttcctcacgtagtgctccatggcgttgacgccgttctcgacgccgcagcgcgggttgtagacgaagcagccgataaagcgttccggatacttcttcaccatctccgcggtgtaggccatgtacgcgtcgatggactcgctgcctgacttcacgccgtcggtgtaggtgtagatggtgttgccctgcgggggctggataaaggctttgtcgatgcggcgcggcttgccgttgatggtgaacgggccgtccatcatctggatcaggcgctcgccggtgaacgggtcgccgtcgtggcgccaggccaggtccaccaggttggtcggataacagctggtgtcgatgatcatgggagatcccctaacaatgactaggttggacacgcatgcggcgggcgtgcgcgaacaacgccgcggggccggccttgcatgctgctatcgggagtctttgtcaggggagctgttggaccactgcgccaccgacgaaaccctccgtcagtgagcaatctccagttgaacctcgcggcattgcgccgctgctgtccaatcgaccgcttctacccacgcgctctttatacctagcgcgcaagcgttgcgtcaagcgcatcatgtgttgcgccgcacgaacagcgggcgcacgtgcattccaaccatggtacgaatccgctacattgcataaaccgtggtggcaggcccgccggcgcggggcagggagaactcgggccgattgctttgaacggggtttatcacggggaagggtgaaaaacatgcacggcaactatgcggtgatggcgggggccatgctgtctgttgcgctgtcgatggcgctgggcggctgcggcggggatgggggccagacggagatggtgtcgccgactgcgacgaccacggcggccacgacaacaaaatacggggtcacggaaaccaccaccagcgccaccacgcgctgggcaccggcgctgaccgatacctggcagatccagctgaccggcaagctcaacaccagctatgcggtgactgcctatgacttcgacctgttcgatacgccgcaggccactatcgctgcgctcaaggcccagggccggcgcgtgatctgctatttctccgcgggcagctccgaggactggcgccccgactacaaccagtttgccgccgcggacatgggcgcgccgctgtcgggctgggcgggcgagcgctggctcgatacgcgctcggccaacgtgcgccgcatcatgcaggcgcgcatggacctggcggtcagcaagggctgcgacgcggtcgatccggacaacgtcgatggctataccaacagcaccggcctgccgctgacggccgagacccagctcgactacaaccgcttcctggcggccgaggcgcatgcgcgcgggctggcggtggggctgaagaacgatgtggagcaggtggcggacctggcggcgagcttcgatttcgccatcaacgagcagtgcttccagtaccgggagtgcggcgcctatacggcgttcacggggcagggcaagccggtgttccagatcgagtacgccaccaagtacaaggacgcggccacgcgcgccgggctgtgcgccaaggcgcaggccgccaacctgcgcacgctggtgttgcccaagaccctgaacggctcgttccgctacgcctgcgacgcctgagtgcctgcgccggcgggggcggcgcgttccagctcccgccaggccaggtagagccgggtatcgaattccagctggtggtagcgcggctccatgtgttcacagagccggtagaaggccttgtcgtgatcgctctccttcaggtgggcgagctcgtgcacgacgatcatgcgcaggaattccggcggcgcttccttgaacagcgacgccacgcggatttccttcttggccttgagcttgctgccctgcacgcgcgagatcgcggtgtgcaggcccagcgcacgctgggccgaatcgaggcgcgcatcgaagccgaccttgtgcagcggcggcgcgctgcgcagatattcctgcttgatgtccgtggtgtactcgtacagcgcgcggtcggtctgcacggtatggcgcccggggtaacggcgggcgatatggtccccgagccggccggcggcgatcagctcgcgcacctgctccagcacgccgggcgggtagccgcccaggaagcgcatcgggtccttgccggcggggcgccaggtttccctcacggcagtggcctgctcagtggtggtgatggtggtgcatccagctgttgtccagcgagttgacgaaggactcgaccgcgtccttgtcgccggtggcgtgacgcatcatctcgccgcacttgcagaagccctggtacggggtgatgtgcgagcaggccgacgtcttctgcaggtacagcgtgacgggtttggtgcacttcttgcacttgaacttcagggtcagggcgggtttgctcatggcgatggctcgggaaatcggcgaaaaatcgaacctgtcattgtaccggccagggcggaatcgagcagcgctgcctcagcgcgccgcgcctgcctgatacactcccgccattcccgaacaaccctccaacacgcacccatggcacagtacgttttcaccatgaaccgcgtgggcaagatcgtcccgcccaagcgtcacatcctgaaggacatctcgctgtcgttcttccccggcgccaagatcggcgtgctgggcctgaacggctcgggcaagtccacggtgctcaagatcatggccggcctcgataaggaaatcgagggcgaagccacgccgatgccgaacctgaacatcggctacctgccgcaggaaccgcaactcaatcccgagcagaccgtgcgcgaatcggtggaagaggcgctgggcggcgtgttcgaggcgcgcaagaagctcgacgagatctacgcggcctatgccgaaccggacgccgacttcgatgcactggccgccgaccaggccaagtacgaagccatcctggccgccagcgacggcaacaatgtcgaactgcagctggaaatcgccgccgacgcgctgcgcctgccgccgtgggacgccaggatcgagcatctctccggcggtgaaaagcgccgcgtggcgctgtgccgcctgctgctgtcgcgccccgacatgctgctgctggacgagccgaccaaccacctggatgcggaatcggtggaatggctggaacagttcctgacgcgctttccgggcaccgtggtggccgtgacccacgaccgctacttcctcgacaacgccgccgagtggatcctggaactggaccgcggccagggcatcccctggaagggcaactacagctcgtggctggaccagaaggaagcgcgcctgaagcaggaagaggccagcgaatcggcccgccagaaggcgctgcacaaggagctggagtgggtgcgccagaacccgaagggccgccaggccaagtccaaggcgcgtctggcccgctttgacgaactgaacagccaggactaccagaagcgcaacgaaacccaggaaatcttcatcccggtgggtgagcgcctgggcaacgaggtgatcgagttcgacggcgtgagcaagggctacggcgaccgtctgctgatcgacaacctcagcttcaaggtgccgccgggcgccatcgtcggcatcatcggcccgaacggtgccggcaagtcgaccttcttccgcatgctgaccggcaaggaacagcccgacagcggcgagatcaagatcgggccgaccgtgaagatggcctttgtcgaccagagccgcgacgcgcttgatggcaccaagaccgtgttcgaagagatctcgggcggctccgacatcctgacggtgggcaggtacgaaacgccgtcgcgcgcctatatcggccgcttcaacttcaagggcggcgaccagcagaagcaggtcggcacgctgtcgggcggcgaacgcggccgcttgcacatggccaagacgctgattgcgggcggcaacgtgctgctgctggacgaaccgtccaacgaccttgacgtggaaacgctgcgggcgctggaagatgcgctgctggaattcgcgggctgcgtgatggtgatctcgcacgatcgctggttcctggaccggattgctacgcacatcctggcgttcgagggggactcgcatgtggagttcttccccggcaactaccaggaatatgaggcggacaagaagcggcggctgggtgaggaaggggccaagcccaagcggattcggtataagccgattgtgcggtgagcgttgtggaggggagttaattcgtcgttcgcgctttcgcgcgaatggcgaatggcgaatggcgaatgacgcagtgttgtcgcaagtcctgcaggacgggaggagtgatgatgaaatctggcaggtctccagtttccctatatctgacgaaatccgaaatcgccgagctaaggcggaacaagaaacgcatctcagacttggctcgaaaggcattcagctcgatgaacctgaagggcaaatagagccccttgggcccgagcggcgccagcggtgagcagacagcgctcgtgccataagcaaaagccccgactcaaatgagcggggctttctgctgagtaatccctgcgaccattcttcggccttctacggcattctcctagcccgctttcaccagcctaacccgcgtaatctccgacggcgccccaaaccgcttcggcggcccccaatacccggtgccacggctgatatagatccacagtgaaccatgccgcaccagtccggcggtgtatggctgctgcatcggcacgaacaggttccacggccagaactggccgccgtgggtatggccggacaactgcaggtcgaaaccggcttccgccgctgcggcagcggtgcgtggctggtgggccagcagcacgcgcgcgccggcgtgtgccggggcgccggcgatggcgcggtgcgggtcgctgcggtggctttcgtggaagcggccggcggagtagtcggtgacgccgccaagtaccagcgcgtcgccgtcgtgctgcagcaccacatgttcgttcatcagcacgcgcacgcccaggcggcgcagctcaatgatccacggctccgcgccggagtagtactcatggttgccggtgacgaagtaggtgccgtggcgcgcctgcagccgggccagcggcgcggtgtgggcggatagttcgcgcacggtgccgtcgaccaggtcgccggtgatggcgacggcgtcggcctgcaggctgttgacgcggtcgacgatgcggtcgaggtagggccgcttgatggtgggcccgacatggatgtcgctgatctgggcgatggtgaaaccatgcagggcgtcgggcaggccggccacgggcacgtcgacttcgaccacgcgcgccagccggcgggcattgatatagccggccagcgtgaccagcagcgccagcagcggcaccgccaccgcactgcccgcggacaggccgggcgcgtgccagccgagcagttgcccggccagccaggccgccgccagcgccacgtcgcgtaccagcgtcagcaccagcagggatgagaagaatcccattgccagcatgccgatccaggaaaccaggtccgaccagggctggctgacgcgccgcgccagcagcccggccggcagcagggcgcaggagagggccagccaggcgacggccaatgccttgaccgccatcggcaccggcatcgccggcagcaggcgcagcccgatatagccgtgcagcagggctgtcacgagggcggcggtcaggatggtggtgcgtggaggcatgggggcgggcctgggcggagtcttcaaagatgaggccgtgcggggcggcttcaagggccgttgtggtggcatcaggccaagcaagatgcacacccgccttgcctgcgcgcgtcgcaacggcgcattgcggcttgacatggccgcctgccgccccgactacttctttgtatgaaggccgctgtcgatggccgccgcgcatgccccatgccaccggccaccggctgatctgtcttttttgggacggatcctgaatgttttcgaatcagattgttcggcttggcggcctaatttagattcgcgggatgggccgtctgttgtgcagcatcgtgcccgcggtgccggcccgccggtgcaggcggcttcctcccggagaaacccatgtcttttcgcctgaagcagaccagcgccctgatcgccgcggcgtggcttgcatttgcaccgctcagcccgcaggccgccacgccggccaagccagcggcgactgccctgggctggccgcgcaacttcgacgccgccaacgatcacgtggagctgtaccagccccagatcgagacctgggacggcaaccggctgtccgggcgcgcggcggtggcggtgggcgagaagtcgggttctccgacctacggcgtggtgcatttctcggcaaccggcgatatcgacaagtcctcagggctggtgcaactgacccgaatcacggtggacagcgtcgaagtgccgacccggcccgacgccgccgaccgggtgcgccaggcgctggtgtcgcgcctgccggccaacgggctgacggtgccgctggaccagctgcaggccagctacgcggtatcgcagcaactggccaaggctggccgcgtggtggtgcgcaatgacgtgccccagattctttttgccaccacgccgacgctgctggtgctggtcgacggcgagccggcctggcgcgccgtgccgggcacgcagtacgaacgggcgctgaacagccgagcgctgctgctgcgcgaatccggcggcgagctgcacctgaaggcggccggctactggtatcgctccgaatcggccggcggcgcctgggaagtgatgacgaccgtgcccaaggcgctggagagcgcggccaccaaggcggcggccggcatgaagcccgacacgatgctgccggccgacggcaagcggccggcgagggcgccggcgatcctctttgccacgcagccgaccgagctggtcatgaccagcggcgcgccgcagatgacgccggtcagcggcgtcagcctgctgacgatgtccaatgccgaccacgcggtctttgtcgatccgggtgccaaccagtattacgtgctggtctcgggccgctggttccgcgcgccgatgctgaccgggccgtgggagtacgtgcccggcgcccagctgccggcagacttcgccaggatcccggcgaccgaccccaaggccaatgtgctggtctcggtgcccggcacgccgcaggcacgcgaggccgagatcgcggcgaccattccgcagaccgccacggtgtcgcgcagcaaggccagcctggcggtggcgtatgacggcgcgccgcgcttcacgccggtcaccggcacctcgctcagctacgcggtcaacagcggcacgccggtgatcgaggtcgacagcagccactactacgcggtcgccaacggcgtctggttcacggcgccggcaccgtccggcccgtggcgtgtggccaccgaagtgccgtcggcgatctacaccatcccgccgacttcgccggtgtactacgtgacctatgtgcgcatctattcggtcacgccggagaccgtggtggtgggctacacccccggctacatgggcgtggtggtcagcgccgacggcacggtggtgtacggcaccggctatgtctatccgccctatgtgggcgcggtctactacggctacccggccacctatggctacggcgccggctttggcatcggcatggccgagggctttgccttcggcttcgccgccggtgcgttctggggcgcggcgtcgccgtactggggcccttattggtggggcggcgcgtacaactggaactacgtcaacgtgaaccaggccaatttctacggccgctggggccagggcaccgtgacccacgcccagggctggaacgcctggaccggcaccgaatggcgcggcaccgccggcgccggctacgacccggccaccggggcgcgctaccagggcagccgcggtggggcgttcaatccctattccggcaactatgcggcgggccgccagggctcgttcgccaatccgtcgaccgggcgcgagggcgccgcgcgcggcggcgtggccggcaacacctacaccggcaactatgccgccggccgccaggcggcgggctacaacgcgcagaccggccgcgtcggcgcggccgaagcgggtattgccggcaatacgcagaccggccagcacactgccggcagccgtggctttgtcgccaatccggacaagaacaatgcggtggtgtggaacaacggcaacgtgtatgccggccacgacggctcggtgtaccagcacaccgacaacggctggcagaagcacacccccagcggctgggaacaggtgcagcccggcaacgacgccactgcgcggctagagcagcagcgccaggcgcgtgagatcggccagcagcgtttccagggcacggcccagcagtggcaggggcgcggcggttggggcggttttggcggccgtgccgggggtttccgcggcggcggtttccatggcgggttccgccgctgagacagggccctggcagcccgcgcgggtgcgggcaaaagcaagtcgaaagcagtaaagacgcctacaaaagaattgaattggcgcccgcagggccgagccttaccctgccggtaaagaggcgagtgcggccaccggtccggcgcgacggaaggtcgccagcgtgcgcgcgcggcgatcgcgtgcataaccatggcgggagagggatccgtgaacactgctttccattggcgcggcgcgctctggctggtctgcgtgatgacgctggccgcctgcggcaaggacaaaccggcgcccagcgcaccgcccgcggccgaggtcggcaccatgacggtggcgccgcgcgatgtgccgatcgtctatgacttcgtcggccagacccagagctcgcagcaggtggagatccgcgcgcgcgtcaatggcttcctggaccggcgcgtctataccgagggcgcggtggtcaaggccggcgagaccatgttcctgatggatcccaagcctttcgccgcggcgctggatgcggccaatgccgaaatggcgcagcaggtggcgcggctcaagaccgccaatgccgacctggcgcgggtgcgcccgctggccgagcgcaacgcgctgagccagcgcgacctggacgacgccgtgggcaagcagcaggccgccgcggccgcggtcgaggcggcccgggccaatgtcaccaatgccaggctgaacctgggctataccacgatcaagtcaccggtcaccggcgtgtcgagctttgccaagaagcaggccggcagctatatcgatccgtcgaacagcctgctgacctacgtggccaagctcgacccgatgtgggtcaatttcagcctgtccgagaacgaggtgctgtcgtcacgctcggagcaggagtccggcgcgctcaagttcccgcccaagggcgcctttgacgtggtgatcgtgatggccgatggcagccagttcccgcatcacggcaagatcacctttgccgatgcctcgttcagcgccgagaccggcacctacatgatccgcgccgaggttgccaaccctgacggcacgctgcgccccggccagttcgtgcgcgtgaagctgcatggcgccgagcgcaccaaggccgtggcggtgccgcaggaagccgtcatccagggcccgcgcgggcagatggtgtgggtggtcggcgcggacaacaaggcccaccagcgcgtggtcgacgtgggccagtggaccggcgacaactgggtgatccgctccggcctgaagccgggcgagcgcgtggtcgtcagcggcgggctgcggctggcgcccgacgcgccggtcaaggccaccgaggtagcgtccggccagaagcccccggcgggtgcggcgcccgccagcgcaccgggtgcgccaggcgcgtcatcccccgcccaggccaagagcacgcagagcgcggggagcaagccatgaagcttgcccacttcttcatcgaccgacccatctttgcgtcggtcctgtccatcatcatcgtggtgggcggcctggtcgcgctgaccaaactgccgattgcccagttcccggacgtcacgccgccgtcgatcacggtgacgactcgataccccggagccagcgcggaggtggtcgcccaaaacgtagcggcgccgatcgagcagcaggtcaacggcgcggaccggatgatgtacatgaactcgacgagctcctcgacgggtgacctgaccttgacggtgtatttcgagatcgggaccgatccgcaactggcgcaggtagacgtgcagaaccgggtcaacctggcgctgccaaccctgcctgaagcggtcacggcccagggcgtttccgtgcagaagcgttcttccgcgttcatgatggtgattgccatcttttcgccggacaacagctacgaccagacctttgtcggcaactacgccaacatctatgtgctggatgcgctcaagcgcattcccggcgccaaccagtcagcgatcttcggcaatccggactacgccatgcggctctggctgcggccggaccggatggcgtcgctgggcattaccacggaagacgtcaagaacgctgtcagcgcgcagaaccagcagttctccgccggccgtatcggacagtcgccgaccaccgatcccgtcctgcagacgttcccgattgcgaccaagggccagatgaccgagcccgccgagttcgagaacatgatcctgcgcgcgcagtcgggcgacgccgcgctggtgcggctcaaggacatcggcagggctgaactcggcgtcaaggattattcgctgcgcagccgctacaagggcaagaccgccacgctgctggcggtctaccagcagccgggcgccaatgcgctggacgtggccaagcaggtgcgcggcacgctggcggaactgaagaagtcgttcccgcccgggctggaatatgaggttgcgctcgacaccaccgagttcgtgaacgaatcgatcaacgaggtggtgcacacgctgcgcgatgcggtgatcctcgtgatcctggtcgtctacctgttcctgcagagcctgcgcgcaaccatcgtgccgatccttgccgtgccggtgtcgatcattggcgccttcgtcggcatgagcatgttcggcttttcggtcaacatgctgaccttgttcgggatggtgctggccatcggcatcgtggtcgacgacgcgatcgtggtgatcgagaacgtcgagcgcaacatggtggagttcaaactgccaccaaaggaggcggccaagcgtgccatggacgaggtgagcggccccgtggttgcgatcgtgctggtgctgctggcggtattcatcccggtggcgttcctgtccggcattaccggccagctctacaagcagtttgccgtcaccatcgcggtgtcggtggtgttgtccggggtggtggcgctgaccctgtcgccggcgcttgcggcaatcctgctcaagcccggcgagcacaagaagaaccggtttttccagtggttcaacaattcgttcgatcgcctgatccaggggtacgacaagtcgctgcaggtcgtgatcaggcggacggtgatctccatcgtcatcatccttgtcatgatcggggtgagcgtgctgatgttcgtgcggataccgtcgtcgttcctgccggtggaggaccagggctatctgttcggtgccgtggtgatgccggatgcggccagcctggaccgcaccggcaacctctcctcccgtgccgaggcctggtatgccaagcagcccggcgtcagctcggtggcgtccgtggacgggtacagcctgatcgattcgcagaacaaggccaatgcttccaccttgttcatcacgctgaagggcttccatgaccgcaaggaaggcgagagcgcggcggatctgatcgccaaggcgaagaaggagtttgcgagctaccaggacggtgtgaccattccgatcaacccgccctcgatcccgggcctgggaacgaccggtggttttgagttctggctccagagcacggcggacggcacctaccagcagctggaggagcgggtgcatgcctttatcgccaaggcgcggcagcggccggagctgaccgggatcaattccactatcaacacgcgctcgcgccagttgctggtggaggtggatcgcgaacgctccgaaacccagggcgtgcccgtcgagcaggtctattccgcgctgcagaccatgttcggttcgctcttcgtcagccagttcccgaagaacagccggctgttccaggtgatcctgcaggccgaggccgactaccgctcgcgtccggaggatctcgacaaggtctacgtgcgcaaccgcactggcgaaatggtgccgatcaaggcggtgacgacatcccggtatgtcccgggcgccgatatcatgacccgcttcaacaatttcccggccgccaagatcatgggcgatgccgcgccgggctacagctccggccaggcgcttgcggccatggaggacgtggcgcgggaggtgcttggccagggctacagctttgcctggagcggacaggcgtacgaggagaagactgccgggtcgacggcagcaatggtctttgcctttgccttgctgatggtgttcctgatccttgctgcgcagtacgaaaaatggacgctgccgttcggtgtgctgctggcggtaccgttcgcgctgttcggtgcactggttgccatcctgttgcgcggcatgcagaacgacgtctacttccagatcgggctgacggtgctgattgcgttggcggcgaagaatgccatcctgatctttgagttcgcggtggaaatccggcacaaggaaggcctcagtgcctacaacgcggccttgcatgcggccaggctgcgcctgcgcccgatcatcatgacctcgctcgcctttatcctcggctgcgtgccgctggcgatcgccagtggcgcgtcggcggccagccgacagtcgctgggcaccggcgtgatcggcgggatgctcggcgccacggtgattgcgctgttcttcatcccgatgttcttctgggggctggaggtgatgtccgagcgcaagcctaagcccaaggtcggggccgcagccaccacgccaccggccggagaaccgtcatgagcgcgcgccaccggctggccggtgcctgcctggccgcagcgctgggcggctgtgccatcggccccaactatgagcgcccggccacgcccgagccggcgcagtaccgcatcgataccggcgtgctgtcggtggccgcggacagcgcctggtgggacagcttcggcgacccggtgctgaacacgctggtcgagacggcgctgcgcaacagctacgacgtgcgcatcgccgcggcccgcatcgatgagttccgcggccagctgatggtggtgcgctcgggattcttcccgcaggtgaacctgtccgcggcggcaacgcgccagcgcgccggcaccttcaacggcacgccgttcgcgtcgctcgatggcccgcgcaactcgtaccagctgctcgccaatgccagctgggagatcgacctgtggggccgcatccggcgccaggcggagtccgccgaggccagcctgtggaacgccgagtacgcgcgccgtggcgtggtgctgtcactggcggcatcggtggtgcagggctacgccacgctgcgcgggctggacgcgcagctggagatcgcgcagcagacgctgaaggcgcgcggggctggactggatatcttccggcagcgctatgagggcggggtgatctcgcaggttgagctgtcgcaggccgagaacgatttctacgtgaccgaggcgacgatcccggtgctgcgcagcggcatcgcgcagaccgagaacgcgctgtcggtgctgctgggccgcgagcccgggccgatcgagcgcggcaagccggtcaatgaactgcagccgccgccggtgggtgcggacctgccagccgcgctgctgtcgcgccggcctgacgtgctgcaggccgagcagtccgccattgccgccaatgcgcagctgggcgccgcgcaagcgttgtacctgccggccgtcaacctgagcgggctgttcggcgccattgccagttcgccggccgggttgtggcatagtgcctcgcaggtgtggggcatcggtgccggcctgacccagccgatcttccagggcggcgccatccgcggccaggtgcagaccgcctcggcacagcgcgagcaggccatgctggcctaccagggcaccgtgctgtcggccctggccgacgtcaacagtgcactgtccaacggcatcgagacccgcaaccgcctggtcagcctgcgccagcaggagaagagcctggtggtctatgccgaccagtcgagcgcgcgctacgagggcggctattccagctacctggaggtgaccacggcacaggagaagctgttcgccgcgcagctgtcggcggtgcaggggcaggtggacgtgctgaccggcaccgcggcgttgtacaagtcgctcggcggcggctggccgtcggtgccgcaggacgtcagggaggcggggatgcagggggatgcgaaggtgttgaggcggtaggacgaagtgctggcgcaattgccaggcgctagcgcaccgcgtgcgccggaattcactgccacctctcgcggacgctcccctctcccgcgaagtgggagaggggtgggggagagggccggagtgtccacgaagtgcagcgcgtcggtatgccagcgcctgccctcacccccagcccctctcccgcaagcgggaaagggaagcaaaccgcaggcgttgaaatgcgctcacgccactgacctcaccgcgccgaccactccccctgcctgacccccagcgccgtgaccaccccataggccgtaatccccagcgccacccccaggaagtgtccgtccagccccatcccgaacacattggccagcagccagccgccgcccaccgccagcgcgatccggcacagccctgcggccaccggccagcgcatgcggcccgcgcccatcgaggcaaagtacagcgccatgcccaggccgaagctgccgaaggccggccctacccatgacagcgcgcgcgcggcgatggcgatcacttcggggtcatgggtgaacaggctggcaaagcgcaccggcgccaggcccacggcaatgccggcggtgccggcgatggccagcgccaggaacgcgccgacccatgccgtgcggcgcgcggtatgccagtcgccggcgcccacggcgcggccgaccagtgcggtcagcgccgagcccacgccaaaggccagcgggatcatcaggaattccagccgcgccgagatgccataggccgccaccgccgcggtgccatggtggcgcagctgcgcggtgaccaggatggtggtcaggttggccaccgaggccagcgcgcacgccaccaggcccaccgacaggatgcgcgcgaacagctcccacgacggccgcacccgcagcaccggcacgaagcccgcgccgccgcgcgccaccacgatcgccatcgccagcgccgcggcccacgacaccgccgccagcgcggcgccgatgccggccagccccatgccggcaggctcggccagcagccacgacagtgcggggaaagcgacccacatcagcgccagcacgcgtgcggccagcgcatggcggccgccgccgcgcagcaccgaggccagcgtattggccagccacgccggaatggcgccgacaccgaacagccagatcgcatagctggcagcggcctccgccgccgtggcgccggccaccgcgcccagcacgccgcgcgggaagcccgccagcaccaccgcaaaggccagcccggcggtcactgcgatcagcagcgcgtgcatgaccagcgaagacgcttcctcgcgcttgttggcgccaagcgcgcgggcgatggccgcgaccacgccgccgcccatcgctccggtcgacatctgctgcagtagcagcgcaaacggcagcaccaccgcccagccggccagcgccgccgtgccctggcgcgcggccagccaggtttcgatcaactgggccacggcctgcagcacggcgatcagcgcggtcggtccggccagcttgccgatgcggcgcgcaatttcagtggccggtaccgcctcggcgggcagggcgcccgcgggcaatgtgcgcgtgtcagtcatggcgggcctcccctggctcgccaacggtcccggcctcgccaaagcgctgccgcaggaagcggccggcaccggggccgggcaggacacgcaaatcgtccagcgtgatcgcgctgccgtcggcgcgcgccagcgccggctcggcaatctcggcgccggtgcggcggtcctgcagcagcgtcagcggacccttttcgtcggtcatccagcggtcggcccaggccttgagcgcgacataggccgggaagaagtcgcggcccttgtcggtcagctggtagacgtggcgagcgccgccctcgggcgttacgcgggccagcagcccgtgcgccaccagcgtcttcaggcgcgcgctgaggatgttgggggcgatgcccaggttgcgttcgaactcgtcgaagcgcgtgctgccgtagaaggcctcgcgcagcacaaggatggcccagcgttcgcccagcacggccatggagcgggccacggggcagggcatcgaggtgaaatcggtagggggcatggtctccgccgttctggtcctgtcgacttgcttgcaaagtgcaagttttctggagcatagcttgcaaaacgaaagtttgcagggctggttgcgaccctgagtccggaaagcgttcgttcaccggccagcggtgccggctacgccaccgcgtcgcggaacacttcaagcttgtccagttcctctcgcaggaacccgatcagcgcgcgggtggccatcgacgggtgcaggttaggcgtggtgatgatgaagagcttgttgcccagcccctccgggcgccagtcgggcagcaccggcaccagccggccggcgcgcacttcctcccagccgatgtagaccggcagcatgccgatgccgaggccctcgcgcacggcgcgcgccaggaacaggaagttttccgactgaagctttggcgtcagcgccacgtccacgcgctggctgtcgcggtacagcgacagcgggaactggcgcggcgggtatggcgggcacaggaagttgcagccggtcaggtcgggcggcgcttgtactggcgggatgtctgcgaggtactccggcgatgcatacagttgccaccggatgtcgcagatttcacgcgccacgtgatccagcggcggcgccgaggtgaccttcagcgcgacatcgatctcggccgcgatcaggtcgttgacgcggttggcgaagaacacgcgcagcgtgatgccggggtgcttccgcgcaaactgcagcagcagcggcgcgatataggcatcgcccagcccggtgggcacgctcacgcgcacatggccgcgcagggtccggcccaggctgtcgatctcggcctgcgccgaggccacttcctgcaggatgcgcacgccatgctggtacagcgcatggccgggcccggtcagttccagccggcgcgtggtccggcgcagcagttgggcgccggcctggtgctccagctcacgcagctggcggctgacctgcgagcgcgtcacgccgcggcgccggccggcttcggccaggttgcccgcatcgacgatgtcgacgaaggcctggatcaggttgaggtccatcggggattgcctgcaggattgtcgcgtctggtgcaacattgtgattccgatgcacctgattgtcgatccacggctacgccgatacagtggtcggctgacagaacggatcgcatacaggagacgacggatggccacggacctctggtttgaagacatgcaccgcagcggcgaagaattgctggcgcgcggcgcccgcctggccggcggcctgcgcgcgctgggcgtgcaggagggcgacgtggtcgccgtgctgctgcgtaacgatccggcctatgccgacgtggtccatgcctgccgtaccgcgggctgctactactgcccgatcaactggcacttcaccgccgaggaagtgcgcttcctgctgaccgacagcggcgccagggtgctgctggtgcaggccgacctgctgcccgccgtgcgcgacgccgttccggccggcatgacggtgctgtcggtgggcggccccgcccaaggcgccatcgactatgaaagctggctggcgcagcagccggcctacgacggcccgcgcgtggcgccgcgcggccatatggcctacacctccggcaccaccggccggcccaagggcgtggtgcgccagccgctgccgctggaccggctggaggaacagttcgcgcgcatgcgctcggtggtgaggcagacctacggcatcgagccgggctgccgcacgctgatgtcggcgccgctgtatcacagcgcgccgggctcgtttatccagaacgcgctgcagatggccgaacgcctggtgctcacgtcgcgctttgatgccgagcaggtgctggcgctggtggaaaagcaccgcatcgacgtgctctacctggtgccgatcatgtacgtgcgcctgctcaagctgccgcccgaggtgcgcgccaggtacgacctgtcttcgatccgcttcgtcgcctccaccggctcgccgtgctcgcccgaagtaaagcgcgcgatgctggaatggctgggcccggtcatccacgaaacctacgcctccagcgaagccggcatgatcaccgtggccacgccggccgatgccgccgcgcgcccggggaccgccggcaaaccggtcgatgacgcgcagctgcgcatcctcgacgagaacggccgccagtgcgcgccgggcgagatcggcctggtctacgtgcgccagccggcttaccccgacttcagctaccgcaacaatgatgccgcgcgcgccgccatcgaccgagacgggctggtgacgctgggtgacatgggctatgtcgatgccgacggctacctgtttatctgcgaccgcgcatcggacatggtgatctccggcggcgtgaacatctacccggccgagatcgagcatgagctggtgcgctaccccggcgtggccgactgcgtggtgttcggcatccccgacgacgagtacggcgagcgcctgctgggcatggtgcagccgatgccaggcgtggagatccgcgaggccgaggtgatcgactggctgcgccagcggctgtccggcttcaaggtgccgcgcagcatcgtggtcgagacgcagctgccgcgcgatgaaaccggcaagctcgccaagcgccggctgcgtgaccgatactgggaaggccgccagcgccgcgtctgagcgcgtgcccggcctggatcgatcacgaccgataacaacaggaggagacgcgatgcagaacaaaccaagcggacggcgcgcctggctcgccgcgatggcagccggcgcggggtgcgcgctggccatgtggggcggagccgcgcaggccgcctatcccgatcgcccgatcaagctggtggtgccctacacccccggcggctcgaccgaccagttcggccgcgcgctggccgacggcatgtcgcgccagctgggccagaccgtggtggtggaaaaccgcccgggcgcggccaccatgatcggcaccaccagcgtggcgcgtgcgccggcagacggttacaccatggtgctggccaccaacggcagcatggtgctcaacccgatgctgtacaagaagatcaactacgatccgcccaaggatttcaagatcttcagcatcggcgccgaggtgccgctggtggtggtgaccaacagcaaggtgccggccagcaatatccgcgagttcgcggcctacgccaaggccgcgggcggcaagctcaactatggctcggtcggcctgggcaacgcgctccagctggccaccgaaatgctcaagaccgagctgggcatcagcgtcacccacgtgccctacaacggcagcgccccggcgctgtcggcgctgctggccaacgacgtgcaactgatggtggatgtggtcagcacctcgctgccgcatatcaaggcaggcaagctcaaggcgctggcggtcaccggccgcacccggctggacgtgctgcccgacgtgccgaccgtggcggaaggcggctatcccaacttccaggccgccacctggttcggcctggccgtgcccgcgcagacgccgcccgatgcggtggccaggctgcaggccgccgctgcccacgtgctcaaggacgcgcagttccgttccaccttcagcgcgctgggactggtcgtgcaggcgccgcgcacgcaggccgagatcgaccgctatatcgaagccgaccgcgagcactggggcaaggtgatcaaggccaataacatttcgttggactgactggaagtgcgggagccgccagggccatggggtaagctactgctcgcccctggcctggcaggccgccggtgactttcccgtcaccgcccgcgccaagcaggaacaacccggccggggcgggctccaacccggagccgttcatcaggagtccgatttgaaattccccgttgccgggctggcgcttgccggcctgctgggcgccgctgccggcgccattgccgcccccgcttccgcccctgccgccaaaccagcccccgcaccggccaaggcccaggccaaggccgagaacagcgcgctgtcgccgctgctggccatgctggaaatcggcaacccgctgccggccttgccggattgcgccgacaagcgcacgcccgatggccgcgatgtcaccggattctgtgtcgaactgaagggcgatggcctgatgcgccaggtcggcgtgccgcgcgcgcagcgcccgtccttcatggacggcccctttgtgctggcctttgtcgaccgcaacgcgctggtcggcctggtggtcccgaccgccggcgccaactcgcagcaggccgcggccgacagcgtcagcgcgctgtacggcaagccgttccggcaggagcaggtcgacatgcccgacaaggctggcaagagcatcaagacgctgcatgccggctggatgcacaagccgctgacggttgagctctacgccatgccggaagaccccaacaccggcaccatcgaaatgctgctgccgcaggcgcgcgtgctgatggcggacaaggatgccgaggtggacaagcagctcaatccggcctcggcgcccgcggccaagggcggcaaggcagccgcctccaagcccgcgccaaagccagccgccaagccggagaagcctggcagctggtaacactccgcagcaggcggcctgcccgcctgctgacctggcctcagagcccttccatcaccttgtccagcccccgcaccacgccgcgcacggtgtggaccttgcggatcgccagcagcgcgccggcgacatagggcgtggagccgtcgccggcctcgtgcttcaggtgcaggcgctggccgtcggcgccgaagatcacttccacgccaagctggtagcccggcagccgcaccgcgtgcacctgcgtgcccgacatggtggcgccgcgggtttccttcgggcccttgacctggtcgaccggcaccgcctgcgcggcggccttgacctggccgagccggtaggccagctcgcgcacggtgccggagggcacgtcgatcttgccggccttggcgtagtcgatgatctcccagtgctccaggtgacgcgcggccatctcggcaaacttctgcagcagcaccaccgtgatggcgaaattgccgcaggcgagcacgccgcggtcggcctggcgcgcggccgcgtcgatctcggcatagtcctcgtcggtcagccccgaggtgcccaccaccacgtgcgtgccgtgcgccagcgcctgcaggatgttgtgcttggcgatgcccggcttggtgtattcgacatagacgtcgtagggcgtttcccccagggcctcgatgctggcggccgccacgcccggcgtatcggcatggccggtcagctgcgccagaggctgcccggcggcgccgcgcgacaggccggccaccagggtcatgtcggccgcatgggccacgccgcgcgccagttcgccgccggcccagccggtcacgccgcccacggcgacacggatcgggttgttcatattgttgctccgcaaacgcttgatcgggttggcagcataccgcgtcagccggcagcgcgccggcggtcgagcttgcgcgcgagcacgatcgaggtggtggtgtggttgacgccgtcgagcatgccgatctcgtcgagcagccggtccaggcggtcgtgcgtgtcgcagcggatcgccaccaggtagtcgaccgggccgctgaccgaattgacctcttcgatctcgggcaggcgctgcagcgcgcgcaggatcgcgggcgcggccttgggctgcaccgacaggccgcaataggccaggatggcgttgtcttccatgcgctgccccagccgcacgccgtagccggcaatcaccccgctgcgctccagccgcgcgatgcgcgcgaccacggtggtgcgggcgatacccaggtgccgggcgaggttggcggcgctttcgcgggcattggcctgcagcagcgacagcaggtgccggtcggtggtgtcgagctcggtcattacgtcgggatggttcgtcgtttcgttcgattatggcgggttttcgtcgttcttgtggcttcattgtgtcgcgctggctatccatactccagtcaacaggacaaccttttcttgtggacggagacaccatgcaagcctcgaacctgggccggcaggccccgcgcgacctgcccaaggcgacccgcccgctgcacgtggcggtgctgggcgcgggcaagatcgggcgcaccattgccaccatgctgcatgacagtggcgactaccgcgtcagcgtggtcgaccatgacgcacggcgcctcgacggcctgccgcgcggcgtgctggcgcgcgccggcgaccccaccgagcctggcacctgcgccgcgctgctggccggcgccgatgccgtgctcaacgcgctgccgttccacgccgcgatcagcgtggcttcggtggcggcgcgcctgggcgtgcattacttcgacctgaccgaggacgtggccgcgacccaggccatccgccagctggcgcaaagcgcgcgctcggtgctgatgccgcagtgtgggctggcgccgggctttatcggcgtggtcgggcatgacctggcgcagcgcttcctgcgcggcgggggggaactgctggacctgcagatgcgggttggcgcgctgccgcgctaccccagcaatgcgctcaagtacaacctgacctggagcaccgagggactgatcaacgagtactgcaacccgtgcgaggccatcgtcgacggccgccgcgtggaactgacggcgctggaggggctggaaagctttgcgctggacggcatcgagtacgaagcctttaatacatctggcggcctgggcacgctgcccgagacgctggccggccgcgcgcgccatgtcgactacaagtccatccgctatccgggccattgcgcgctgatgaaactgctgctcaacgacctgcgcctgcgcgaacgccgtgaatggctgcgcgatatcttcgatcgcgccatcccggtgaccgaccaggacgtggtgatcgtgttcgccaccgccaccggctacccggccgggggcgaacgcgggcgcgggccgctgacgcaggcttcgttctcggcgcgcatcggcggggtggatggcaaggggggccatgtcaacgcgatccagctgaccactgccgcgggcatctgcaccgcgctggacatggtggccaccggcgcgctgccgcaatccggcttcgtgcggcaggagtcgatgccgctggacgccttccttgccaatcgcttcggccgccattacacgcagcatccgctccaggagaccgtcatatgaaagcgcaagagttcgctgcctgctgggattcgctgggcctgccgcggccgtggcgggagggcacgccggccggcgccgtgacggtccgctcgccggtcgatggcgaggccatcggccatgtcccggcctgcacgccggcgcaggccgatgcgctgatcgcccgcgcccacgcggcgcagaccacctgggcgctgctgcctgcgcctgcgcgcggcgagatcgtgcggcgcttcggcgaggtgctgcgcgaacacaagccggcgctgggccggctggtctcgctcgagtccggcaagatcctgcaggaaggcctgggcgaggtgcaggagatgatcgacatctgcgacttcgcggtcgggctgtcgcgccagttgcacgggctgaccattgcctccgagcgcccgcagcatgcgatgcgcgagacctggcatccgtatgggctgtgcggcgtgatctcggccttcaactttccggtggcggtgtgggcgtggaatgcggcgctggcgctggtgtgcggcaacggcgtgatctggaaaccctcggaaaaagtcaccctgtgcgcgctggccgcgcatggcctgctggagcgcgtgctcgccgcggcggcgccgcagcacgccggcatctcggcggtgctgccgggcgggcgcatgctgggcacccacctggtgtcgcacccggcggtgcggctggtcagcgccaccggctcgacccgcatgggccgcgaggtcggcgttgcctgcgccgggcacttcaagcgcagcatcctggagctgggcggcaacaatgccgccatcgtcgcgccttcggccgacatcgagctggcggtgcgggccatcaccttcgccgcggccggcaccgcgggccagcgttgcaccacgctgcgtcgctgctttatccacgccgacctgatggacaccatggcgagccggctgatcaccgtgttcgaccgcctgcccgtcggcgacccgctcgctgacggcaccctggtcggcccgctgatcgacaccgccgcgggcgatgccatggccaatgcgctggccgcctgccgcgcgcagggcaatatcgtcaccggcggcgaacggctgctggccgaccgctacccgcatgcctgttacgtgcggcccgcgctggtgatgaccgacgcccagcacgacaccatgctgaccgaaaccttcgcgccgatcctgtacctgatgccgtacaccacgctggatgaggccatcgcgctgaacaacgcctcgccgcacgggctatcgtcgtgcatcttcacggaatcgatgcgcgaggccgagcgcttcctgtcgtcggcaggcagcgactgcggcatcgccaacgtcaacatcggcaccagcggcgcagagatcggcggcgccttcggcggggaaaaggcaaccggcgggggccgcgagtcgggatcggatgcgtggaagggctatatgcgccgcgccaccaacacgatcaactatggcgattcgctgccgctggcgcaggggatacggttcgagatctgacggcatccctgggcgtgttacagggcgcgtagggaactgtaacaagccttacacgcctttgacgccgtattacgctttctgcccgtataacgtcagcagggcaggcacatgcccgttccgaccccaaggacgaatgatgagaatgctgacgattggactggctgccgctgcggcatccgtcaccctgctgggcggctgcgccgtctatcccacgcctgccggccccgcggtcggccctgcgccggtgtacgtggcgcccgcgccggtggtggtggcaccgcggccgtactactacggcggctatggcggctactatggccatggctactatggccggggctaccgccgctggtaatgagcgcggttggcacgacaatgcgcgaggatgccggcgcgtagagagaggctgcgcgccggccgcagttcagttgccggccgcgtcgccggcccgggcgttcagcccgccccagctgggcgcgagcgtctggccgatctccggcaaatccaccaggtcgagcacgcgcccgaccgtatggtcgaccagttcggcaatgctttgcggcttctggtagaagcccggcaccggcgggaacacgatcccgcccatttccgtcaccgccgtcatattgcgcaggtgcgcaaggttcagcggcgtttcccgcaccatcagcaccagcttgcgccgctccttgagcgtgacgtcggcggcgcgcgtgatcaggttgtcggacaggccgtgcgcaatcgccgccagcgtgcgcatggagcagggggcgaccaccatcgcctgtgcgcggaacgagccgctggcgatggtcgcgccgatgtcgcgcacgttgtgcacgacgctggccagcgcctccacctcggcacggctgatgtccagctcgtgctgcaggttcatcacgccggccggcgaaatcagcagatgggtttccaccgagggcgccgcgcgcagcacctgcagcaggcgcacgccgtagatggcaccagtggcgcccgtgatggcgacgatcagccgtttgggtgtgccgccagtcacggacataaaggaactcagcccttcagcagggtttgcagttcgccgttctggtacatctccatcatgatgtccgagccgccgatgaactcgccgttcacgtagagctgcggaatggtcggccagttggcgtattccttgatgccctggcggatgccttcgtcatccagcacgttgaccgtggtcggcgcgtccacgccacaggccttcagaatctggatggcgcggcccgagaagccgcacatcgggaattgcgcggtgcccttcatgaacaggactaccgggttgctcttgacgatctgatcgatcttttgctgcacgtcgctcatggtttgcttttcagtggggcgatgccgtgtcgcgggcgccgcctggggagaatgggacgccacgcggcctggccgcgtggcggggatctgacggcgattttaccggaatcgccgccgggcttcagtgaccggcagtggtgccgccgggccgggcgccttgccagcgcccgccggtgcagcgttccaggccggccaggtcgcgggcggtgaagatctcggtgaaaccggtgtcctccagcagctggcgggtggcctgcgcctggtcgtagccatgctccatcagcagccagccgtcaggcagcagccgggcgccggcaccgctgacaatggcccgcaggtcggacaggccgtcgtcgtggtcggtcagcgcgtcgatcggttcgaagcgcaggtcgccttcgaccaggtgcgggtcgcccgcggcgatatagggcggattgctgacgatcaggtgaaagcgcaggcctggcggcagcgccgcgtaccagtcagacaccaggaagtggatgcggtcggcgccgagcgcgctggcgttgtcctgcgccaccatcagcgcgccgggcgagatgtcggtggcccagacttgcgcatcccggcgctcgcgcgccagcgtcacggccaggatgcccgagcctgtgcccaggtccagcacggtcggctgcggcacctcggccagccgcgccagcgaggcttcggcggcgacttcggtatcgggccgcgggatcagcacgtcaggcgtgacccggaacttgcggccgaagaactcgcgctcgccgatcaggtaggccatcggctcgcccgccagccgccgcgccagcagcgtggcaaaggcgtcgcgctgggcgatggtgagggtgtcggtgtcgcgggtgatcagctgggtgcggctcaggccggtgacatgcgtcagcagcatgcgcacttccagggcaggcagcccggccatggcggcgagggtctgggcttcgcgcagcgtgggggtcgccggcagcgcggcagagtttggggaagacatcgaaagggaggggacggttcttttgccggctacaaaaaaccccaccggcgcaaaggcctggcggggctttggggcgggacttccagcttgccgccagtgtaccgctcatcgacggcgggcggcgcaatgcccccgccgggacgattacttattgacggcgtccttggccttgtcggcacccgtgttgacggcatccttggcggcctgcttggcgtctgccatggcgctgccggcttctgccttggccttgtcggcggcggccgagaggtcggctgcggcaccgctggcggcggccttggcggcgtctgcggcgttgctggcggcagcggcggcatcgctggcggcggccttggcggattcagcggcgctttgcatggcgctctcggcgttcgaggcggcaggcggagcttcttccttcttgctgcaagcggccatggccgcggtgatcatcaacagcgcgagcagttttttcatgatttcgtcctaggtatgttctcgggagtgactacccggcaccattctccgtttgccggtcgaaatcgattatagacagccgccttacccctaccagtgctgtttcaagcatttacaagaaatacaaagatatcggcgactttacgcggtgttcggggcggaaggccggttgcacgacattttgtggtgcttacgactcttcgccaagtgcagcaagctgatcagcctggtgttccgaagccagtgccgacagcagctcatccatgtcgccgtccatgatcatgtcgatcttgtacagcgtcaggttgatgcggtggtcggtcacgcgcccctgcgggaagttgtaggtgcggatgcggtcgctgcggtcgcccgagccgatcaggttgcgccgcgtgctggcctccttcgcctgggcggcgcgcgtctgcatgtccttgatgcgggccgccagcaccttcatcgccttgtccttgttgcggtgctggctgcggtcgtcctggcactcgaccacgatgccggtcggcaggtgggtcaggcgcaccgcggaatcggtcttgttgacgtgctgcccgccagcgcccgaggcgcggaaggtgtcgatgcgcaggtcagccgggttgatctcgacctcgcccacttcatcggcttcgggcatcaccgcgaccgtgcaggccgaggtgtggatgcgcccctgtgcctcggtcgccgggacgcgctgcacgcggtggccgccggattcgaacttcagcctggagaatgccgcatcgccggcgatgcgcacgatcacttccttgtagccgcccaggtccgatgccgattcgctcatcacttcgacctgccagcgctggcgttcggcatagcgcgtgtacatgcgcagcaggtcgccggcgaacagcgcgctttcctcgccgccggtgccggcgcggatttccagcagcaggttgcggtcgtcgttcgggtccttgggcagcagcaggcgctgcaggctcgcttccaggccttccagccgcgcgcgcgcgctggcgatctcgtcggcggcaaagtccttcatctccggatcgtccagcagcgcctgcgcggtggccaggtcgtcctgcgcctggcggtactggccgtactgctcggccaccggcgacaactcggcatgttcgcggctgagcttgcggtactggtcgatcttcgcggtcgcgtcttcgcgcgcgagcagggcgttgacttcatcgagtcgctcggccagttggtcgagcttggcaagcatgctggctttcatcgggtgcgggggaaagaggtgggccaggggccggggctacccgcgggcgggtggcggcgtgccggcgcggcagggcgcgcgcggcgcaagggcagagcggctagcgctcggagtggctgctgtggcggaacaggcccggcaccaggcgcagcagcgcctcgcggtcctcgccctgggtgtggttcagtgcgtgggtggggccatgcaggaacttgcgggtcagcgcaccggagagggcctccaacacggcctcggggtcgtcgccgcgtgccagcatgcggcgcgcgcgttccagctcggcctggcggatggcttcgccgctggtctgcagttcgcggatgaccggcaccacgctgcgggtttccagccagtgcatgaagttctgcacccggctttcgatgatggcctcggcctgcgccaccgcggcctggcgcatcgcattgccttcacgcacgatcgcgccgagatcgtcgacggtgtacaggaagacgtcgtccaggcgcgcgacttcgggctcgacgtcgcgcggcacggccaggtcgaccatcatgatggggcggtgcttgcggcgcttgaccgcgcgctccaccgcgcccagcccgatgatcggcagcgagctggcggtgcaggacaccacgatatcgaactcatgcaggcgctcgcccaggtcggtcaggcggatcgcgttggcggtcaggccctggccggagagctgctcggcgagcttttcgccgcgttccacggtgcggttggccaccacgatctggcgcggctgctgcgcggcgaagtgcgtggcgcacagttcgatcatctcgcccgcgccgataaacagcacgcgctgggtcgagacgctttcgaagatccgctgcgccagccgcaccgcggctgcggccatcgataccgaatgcgcgccgatctcggtctggccgcgcacttccttggccaccgcgaaggtgcgctggaacagctggttcaggtacgtgcccagcgagccggcctcgccggcggtgcgcacggcgtccttgagctggcccaggatctgggtctcgcccagcaccatcgaatccaggccgctggccacgcggaaggcatggcgcacggcttcggactgcggcagcgcgtacaggtgcggcgccagttcgccggcgggcacgttgtggtgctgcgacagccagcgcagggtgtgctcgaaaccatccgtgcccggcgtcaggacgtcggtcgcgcagtagatctcggtgcggttgcaggtggacaggatggcggcttcggtgccgctgcgccccgacaggtgggagcgcagcgcacccagcgcgggcttgatctgctcgagcggaaacgccacccgctcgcgcagcgagacaggtgccgttgtgtgattgatgccgatcgcgagcagttgcatttgtaggggacgggtacggtccggagcgtggccggaccggatgccattataccgccgggatcgctaattgcaggcgctgggccatccggggccgggcgggggcatggcagcggctccggattgcagtatcgttacgccgcagcccttgcggctgtgatgctgacaacacaggagaagcggatgctgggcaccttgatcgtgggtttgctggtggggctggcggcgcgccggctgcatccggcagggcgcgtggtgaccctgccggccgcgctggtgctgggtgcggcgggtgcggcgggcgctttctatggcggccgggccttgcacctgtttatcgacgggcagctcagcagctggctggcggtgatcgccggctcggcgctgctggtgggggcctggggcgcgctgcggccgcgcgggcggtaagaacagaactgaccgcggcggcgggaatccgctcgccgcttgatcgcgatcagaagcggaccggcgtttgaacagtgtcggccttggctcttccggccagcagccggcgcagcacgccactggaatagtgactggccacatccttcaggaatgccgcgaagtccacatgggcgctatcgtcggcccggtccgaaatggtccgcatcacggcatacggcacgccgtattcatggcagacctgcgccaccgcggcgccttccatttccaccgccagcaatccgggcagccgctcacgcaactccgtcaccgccgccggtgagccgatgaactggtcgccgctggcgatcattccgtggtgcagcgccggcgcggctacgccgaatcgttccagcacctcgcgcggcacttcggcaggcaggtccagctgcagaaattcgcgcgcggcggcttccagctcggcggtcagcgccgggtcggccgggaactcggcacggtccagcagcggcacttcatggcggccgaagaacggacgtgcgtcgaggtcatgctggatggtgcggtcggcgatgacgatgtcgccgacattggtgccggcgccaatgcccccggccagcccggtgaagacgatctgcgtcgcgccgaactcgcggatcagcgtgaccgtggtcgccgacgccgccaccttgcccatgcgcgccagcaccagcacgcacggctgcccgagcagctggccggcatagtagtcgcgcatgccgatggtgcgcaccgtggcgcggctgtcgtcatggcgcatggcggccaccaggccatcgacttcatcatggatggcggcaaggattccgagagtcatggagcgggcgcaggacgagaaaaccacagcataccggcccgcgcaggccgggcatagatcagagcgcgaccgcaccgcaccctcccacggaacaggtgcggcccccgcgccgctttgctaaagtccccgtcatctcagcacgtaaggacacttacatgcaaggcacacccaccgtagccaccggcgaacggcgcgccatccgccgggcactggccgactggcgcgcactggggcgcctggacgcggccggcgtcactgcgccgtgggcgcgcaccgagcccgtcgccaccgactggcgccgctggctggacacggcgctgatggcgctgggcaccgcactgctgtgcgcgggcgtgatcgtgttcttcgccttcaactggcaggatctccacaagttttccaagttcggcctgctggccggcgcgctcacgctgctcgccgcctttgcctggctgcgtccggctggcgacaccgcgggccgggccgcgctgggcggcgcgcaggtcgtcgccggcgtgctgcttgcggtgatcgggcagacctaccagaccggcgccgacgcgtggcagctgtttgcgctatgggcgttgctggcggtgccctgggcgctggcggcgtgcgccgcaccgcactggtggctggtaatcgtggtcggcaacgtggcgttgctgcgctatttcagcatccgcttcggtgtcgaaggcgtgttcgcgctgctgttcgatacgcgccatatacgcaccgccacgctggcgctgctgggcgcggtggtgctgcaactggcgctgtggcagctgctgtgcgcgcgggcgccggcgctgggcttccgtgggcagaccggcagccgcatgctggccgcaatggcctgcgtgcacgccggctcgctcgggctggccagcctgctggacagccatttcgacggcgctgcatttgcgctggcggtggtggtcctggccgccctggtctggtggttccgccagcgcgtcttcgacatcgtggtgctgagcctggcctgcctgaccggcatcgtgctggcggtggccggcatcgccaaggtgctgttcgagggcaaggacgatttcggcgccttcctgctgctcgggctggtgaccatcggccttgccgccggcgcggccgcctggctgatgcgtgcctggcgcggccaactggagcaggcatgacgaccgaactgcagaccgggcaacgcctctggcaggacctcgccgcacgcggcgaggtacagggcgagcggcccgaccacacccacaccccctgggccgtgcgctgcctgatgggcgcggccggctggctcggtgccttgttcttccagctcttcctggtcggcacggtcttcgtcgccgcgcgcgagaacggcattgccatggcggtgaccggcctggccatgatcgcactggccgcgctgctgtactggcgtggcggcggcattgccgcggggcaattcgcgctggccgtgagcctgagcgggcagggcatggccgtgttcgggctggtcgaggccctgggcttcacgcgcgtcaccgagagcgcaggcttctgggccgggctggcactgttcgaggccgcgctcgccttgctggtcccgaaccggctgcaccggctgctgtgcgcggtgggcgcatggatcgggctggcaggcgccatgcatctcgtcctggccggcagcgagccggacgactggctgttgctgacgtggtccctcggctggctggtgccgctcggctgcgcgctggtgacgggtttcacgctggccgaagcacgcctgtgcgcggccggccgccacacgctgctggaaccgctggccgacgcgacgctgctgttcacgctggccgtcgcactggtcgtcaccggcatgagccatccgctggcctggctgggcggcccggaagccggacgcatcccgctcgcgcactgggtcgcgggcgggctggccacagtggtgctggctggcttcgcgctcgccgaatgccgccggctggcgctcagccccgccctgcagggcgccgtccttgccggcgtggcggccttcggcgcgctgatggcggccgcgcccgcggtcgtggcaggagttctcgcgctcggcctggcgttgcgccgcgcgtcgatgccgtggctgggcctgggcatcgccagcatcgctgtcggctttatctggtactacagcgcgctgcactggaccctgctggccaagtccgccacgctcgccgtggccggtgcactgttgctggccggccgctaccggctgctgcgcacccgcaccggcaaggaggccgcatgaaacgctggatcctgatcgcctgggccctgacgctggcactcgccgccgccggcatcgcaggcaaggagcgcctgctggcacgcggtgagaccgtctacctcaagctcgccccggtcgacccgcgctcgctgttacagggcgactacatggcgctgaactttgacatcggcaaccagatccgcaccgctcagacgcaggacgaccggccaccccgcgacggcgtggccgtgatccgccgcgatgaacagggcgtggccagcttcgtgcgcgtacacggcggcgagccgctggcggcaggggagcagctgctgcgctaccaggtcgcccgctcgagctggggcggcacgcgggtgcaggtgtcgaccgatgcgtatttcttccaggaggggcagggcgagcggtttgcgcaggcgcagtatggggaattccgcgtgggggcggacgggcaggcgctgctggtggggttgcgggggaaggggatggagaggttgtgaggcgaaagtgatgtcccccggcccaaaagaaaaagccaccgcatgcggtggctttttcatgacgtctggcggtcttagacgttgaacaggaagttcatcacatccccatccttcaccacatactccttgccttccgcccgcatcttgccggcttccttcgcgccggtctcgcccttgaagctgatgaagtcttcataggcgatggtctgcgcgcggataaagccgcgttcgaagtcggtgtggatcacgccggctgccttgggggcggtgtcgccgacgtggatggtccaggcgcgcacttccttgacgccggcggtgaagtaggtctgcaggccgagcagcttgaagccggcacggatcacacggtccaggccgggctcttccatgcccaggtcggccaggaattcggccttgtcggcatcgtccaggtcggcgatctcggcttcgatggcggcgcagacggacaccacgggggaattggtcagcttggcgtactcgcgcacggcgtccaggtgcgggttgttctcgaagccgtcttcacgcacgttggcgacatacatggtcggcttggcggtgatcaggcagaacggccggatggcttcccactcttcgggcgccaggtccagggtgcgcacggccttggcctggtccagcacggcttgcgccttttccagcacggcgacgaggcgctgagcttccttgtcgccggcgcgggccggcttgatgtagcgggccagggccttctcgacggtggccaggtcggccagcgcgagttcggtgttgatcacttcgatgtccgacagcgggtccaccttgccggcaacgtggatgacgttatcgtcctcgaagcagcgcaccacgtgggtgatggcgtcgcattcgcggatattggccaggaactggttgcccaggccttcacccttggaggcgcccgccaccaggccggcgatatcgacgaactcgaccgtggccggcagcacgcgctccggcttgacgatctccgccagcttggcgagcctcggatccggcacttcgaccacgcccacattgggttcgatggtgcagaacgggtagttttcggcggcgatgccggccttggtcagggcattgaacagcgtggacttgccgacgttgggcaggccgacgatgccgcattggaggctcatgatagaaggcgggaaattgcaaaacccgtattctagcggatgggggcctcgccatcggccgggttgagccggcgtggggcggagccaggagtgacgtggctataatccagccatgacccgatcccacgcgtccgcgcgcccgtctgcgcgcaactcctccgctttccaggttgctgtcgtcggcggcggcatcgtcggcaagtcctgcgcgctgctgctggcccagcagggcatggacgtggcgctggtcgcgcccaggccgccccgcgccagcggccgcacggcggcggggccggatgactgggacagccgtatctacgccttctcggccagctcgcaggcgctgctggagcgcatgcgggtgtgggaggcgctggacccggcgcggatccagccggtgcgcgacatgcgcgtgttcggcgatgtcagcgcggccgagacctcgcccagcctggacggggacctgcatttctcggcctacgcggccgcggtgccgcagctggcgtggatcatcgaatccagccacgtcgagcgcgcgctcgacacagcgctgggcttccagcaccaggtgacctggcacgacgccacggcgagcgcgttcgagcgcgatcctgacggcgtcacgctgaccctgggcaatggcgagaagctgcgcacggcctgcgtggtcggtgccgacggcgcgcgctcctggctgcgccagcaatgccacatcggcgtcagcacgcgcaagtaccgccagctgggcgtggtcgccaatttcgcctgcgagcgcccgcaccaggaaaccgcgtggcagtggttcctgggcgcgcccgaaaaactgatggccgacgaggaacccgccaacggcgaagtgctggcgctgctgccgctgccggacaaccatgtgtcgatggtctgggccgccgaagaggcccacgcgcgcgagctgctggcgctgtcgcccgaggcgctcgccgccacggtgatgcagggcgccagcggcgcggtcggcgcgcagttcggcgcgctgcgctgcgtgaccccggcgcagggcttcccgctggtgctgcagcgtgccgaccagttcgtgcagccgcacgtggcgctggtgggcgacgccgcccacgtgttgcatccgctggccggccagggcatgaacctgggcctgcgcggcgtcgcggaacttggccgcgtgatggccgacaaagaacctttccgcagcgagggcgacctgcgcttgctgcgccgctatgagcgcgcccgcgccaccgatttgcttgcgctgaccgcggccaccgacggactgcaccggttgttctcgttgccgggcggcgtcgcgcgcgtggtgcgcaacaccggcatgcgcgcggtcggcggccagtccttgctcaagcgcttcctgatcgcgcgcgcgcttggctgaccgcggccgcgccaacgttccgatccctttaccgaatactctggagtccacatgttcccattcctgcgccgccgccccgccatgagcgccgcgatcaccgccatcgccggcgggctggccgcggcgggcttcgcgctgcatgccatggccgcgggcgagcccggcaccgaccgcatcaaggagtcgctgcagaagatggtgggcggccgtgctgaagtgaagagcgtgagcaagaccccggtgccgggcctgttcgaggccaatataggcgggcaggtggtctacaccgacgcctcgggccgctacatcctgaacggcgagatgatcgacacccgcaccggcaccaacctgaccgaggagcggctggccgagatcaaccgcatcaagtggtcggacctgccgctggcgcgcgcgatcaagtggaccaagggcgatggcagccgccaggtggcggtgttctccgaccccaactgcggctattgcaagcgcatcgagcagaccttccagcagatggacaacatcaccgtgtacaccttcctgtacccggtgctgtcgccggattccgaaaccaaggccaagcaggtctggtgcgcgtccgaccgcaccaaggcctggcgcgactggatgctcaagcaggtggcgctgaccggcaacggcagctgcaagaccccgctggaagaaaacctggcattgggccacagcatgaacgtgaccggcactccggcggtgttcttcaccgacggcacccgcattcccggcgcggcggatgtcgccacgctggaacgcaagctcgccagcatcaagaaataagcgcgcgccggacctgtaccggcccgatcgacggccggacttgtccggccgttctgcattctgccttttccctgattccatgcgatcgccggcaggcgacaaaggagacaccatgaccttccaggcattgctgctgacccaggccgacggcgccacccaggccagtatcgccacgctcgacgacgcgcagctgcccgccgacggcgacgtgctggttgccgtcgactactccaccatcaacttcaaggacgggctggcgatcacgggccgctcgccggtggtgcgcaagtggccgatggtggcgggcatcgacggcgccggcacggtgctggaatccgcgcacccgcgctggaaggcaggcgacaaggtagtgctcaacggctacggcgtgggcgagacgcattggggctgccttgcgcagcgcgcgcgcctgaagggcgactggctggtgcgcctgcccgacgccttcaccacgcgccaggccatggcgatcggcaccgcgggctataccgcgatgctgtcggtgctggcgctggagcgcggcggcgtcgacggcccggtgcgccccggcgatggcgaggtgctggtgaccggcgcctccggtggggtggggacggtggcgatctcgctgctgagcaagcttggctacaaggtggtggcctcgaccggcaagacccgggaggcggatttcctgaaggcgctgggcgccgatgacgtgatcgaccgtgctgagctgggcgtacccggcaagccgctgcaaaaggagcgctgggccgcggtggtcgactcggtcggctcgcacacgctggtcaatgcctgcgcccaggtgcgctacggcggcgtggtgacggcgtgcgggctggcgcagggccttgacttcccggggtcggtggcgccgttcatcctgcgcggcatcaccttgcacggcatcgacagtgtgatggcggcgatgccgctgcgcgagcaggcctggcagcgcctggccggcgacctggagccggaccggctcaatgcgctgacgcgcgagatcggcctgggcgacgcgatcgaggcgggccgcaagatcatggaaggcggcatgcgcgggcgcgtggtggtggatgtgaatcgcggctgatcgcgcaccgtcgccctgatgcaccaccgcgtcggcgctgcatccgtgtcctggcgccgacgttacaatcctgcccatgacgccgatccgctacgccatcgccccgcttcagcctgaagcgcacctgtttgccgtcaccgtcaccgtgagcgaacccgatcccgccggccagtgtttctcgctgccggcctggatcccgggcagctacatgatccgggacttcgcgcgcaatatcgtgcgcatccgcgccgatgcgggcgggcgcgaggtcaggctgaccaagctcgacaagcagcgctggcaggccgcgccggtcagcctggccgacggcccgctgacgctcagctacgaggtctatgcctgggacctgtcggtgcgcgcggcgcacctggacaccacccacggcttcttcaacggcagctcggtgttcctgtgcgtggacgggcaggccgagcggccatgcaccatcgatatccatgcgcccgccggcgaggcctatcgcggctggcgcgtcgccaccgccatgcgcgaagcgcccggccgcgcaggcgcgaagcgctacggcttcggccgctaccaggtggccgactacgatgagctggtcgatcatccggtcgagatgggcaccttccagctggccagcttccgcgcctgcggcgcgcagcacgacgtggtcttcaccgggcgcgtgccgcagctcgacctcgagcgcgtgtgccgcgacctgaagcggatctgcgaagcgcagatccggctgttcgagcccaagaccgcgcaggcgccgttcctggacagcaaccgccgctacgtcttcatgacgatggtcaccagcgacggctacggcggcctggaacaccgtgccagcaccgcgctgatatgcgcgcgcaatgacctgccggtgcgcggcgacagcgataccagcgagggctaccgcaccttcctcgggctgtgcagccacgagtatttccacacctggaacgtcaagcgcatcaagccggccgcgttcgtgccgtaccggctggccgaggaaacctacacgccgctgctgtggctgttcgagggtttcaccagttactacgacgacctggtgctggtgcgctccggctgcatcaccgacgagcagtacatcgagatgctggccaagacctggaacggcgtgctgcgcggcagcggccgcaccaagcagagcgtggcggaaagctccttcgatgcctggaccaagtactaccgccaggacgagaacgcccccaacgccatcgtcagctactacaccaagggttcgctggtggcgctggcgctggacctgaccattcgcgacaagacccgcgggcgacgctcgcttgacgatgtcatgcgcgcgctgtggcgccgctacggccgcggcttctacgcgccgggcgcggtgcagcgcggcgtgaccgaggccgaggtccatgcgctgttcgatgaagtcaccggcctgcgcatggggccgctgctgcgctcgctgaccgaaggcaccggcgagctgccgctgccggcgctgttcaaaacgttcggcgtcaaggccgatgcgcagaagccggcgcgcaccgcggcgctgggtatcaaggtcaagagcgatgagggctgggtgcgcgtggcgcaggtgttcgacggcggcgccgcgcaggccgccggcctgtccgccggcgacctgctggtggcgattgacggcctgcgcgtggcgccgggccagatcgacaagctgctggcgcgctaccgtagcggcgaccgcatcgagctgcacgccttccgccgcgacgagctgcaggtgctgccggtgacgctggcacgcgagccggcggcgcagttcaaggtgaagctcgagagcggacggcacgcggcgcgctcgcgctggctgggccagtgaactagttttccgctgccacacccgccaccgcacgccatcgcccccgctgcatgcaatacgcgcacgatccccgcaccttcctgtattcgcactacatctaccgggggctgcgctcggccaccggggtgatcggcgccacgctgatcgcgctgcacttcagcgacctgcccaccgcgatggtggtgtcgatgggggcgctgtgcaccagcctgatggacctgcccagcccgctgaaccacaagttcaacgagatgatggccagcgtgctgctgtgcagcgtggtcacgctggtggtggcgctggccacgccgttcccgcgcgtgatgccgttcctgctggtgctggtgacgttcctggccggcatgatgacggtgtacggcaacaagacgctgccgctgcagttcgcggcgctgttcgtgatgacgctgaccatcaacgaagacttcctggtgcggcgcgcgctggagcacgcggcgctgttcagcatcggcgcggtcgcttatctcggctatgcgatgctggtgagctggatcaccgagcgccgcaccaagcagcaggtgctggccgaatcgttgtatgagctggccggctatctcgagatcaaggccggcttctacgacgccggcaacgactacgaggcccagttcaaccagctggtgcgccagcagatcgtggtggccgagcgccagcaggccgcgcgcgacctggtgctgcgcggcaaccgcactccgcacgacgggctgctggtgcaggtgcacctgcgcatgctcgacctgtacgagtatattctgtcgaccaacaccgactatccgctgctgcgccagacctttgccggcacgccggtgctggaccatctgcgcgggctggtgctgcagatgtgcaaggacgtggaagagatcgcctacgagatcacgcgcggccgcgcctcgtacgccacggtggaatatcgccagggcctgcgcgcggtcgaggccgaggtcgagcaatttcgccaccaccatatcaacccggcggcgatgacggcgctggtcgatacgctcgacatgatgcgcggcgcgatcacgctggtcggccagctgcacgaagcgtcgcgcacgccggtggagccggccagggtgctgcccggctcggacatgacgccgttcctgacgcgccagaagtatgagttcagcgtgctgcgcgacaacctgaagtggagttcgccggcgttccgcttctcgctgcggatctcgatggcggtgtcgctggggctgtggattgccgagcacctgccctatgtgtcgcacagctactggatcctgctgaccatcatcgtcatcctgaagcccaacttcagcatgaccaagcagcgctacaacgaccgcctgatcggcacgctgattggctgcgtggtcgcggtcgcgatcctgaaggtggtgcaccagccgctgatcctgctgggcgtgctgttcctgtcgctggtggccagcgccgcgttcgtgaccatcaagtaccgctacaccgcgattgccgcctgcatccaggtgctgatccagatccacctgctgatgccgggaagtcccacggtggcgggcgagcggctggtggataccgtgatcggcggcatcatcgcctcgctgttcagctttgtgctgccgagctgggaataccgcgccatccccaagctggtggagggcgtgctgcaggccaaccgccgctatatcggcgccacgcgcgacctgctgctgcgtaggaccaaggatgactttgcctaccgcgtgcagcgcaagcagtttatggacaacctgtcggcgctgatctcgtcgttccagcgcatgctggacgagcccaagagccggcaccgtgcggtggacaacctgaaccgctttatcgtgcagaactacctggtggccgcgcacgtggcggcggcgcgcatccaggtgcgccagcactatgacgagctcgatatcccggccgcggaagccgcgatcgagcaggccaccgaggccgccagccacagcctgcaggtggccagcgagcggctgcatgccgatgagcggggcggcggccgtggcgcgggctttatccgcagcgggaaaacgccgttggaacgcaaggaggcagtgcctgccgccgcggacaaggcggaggaatctcccgctgaagctgtcgccgatgccgaaccagtggcggccaccgtcagcgtcgaagtcgccgaggccgccgaggatgccgtcgccgaacgccgcgcccgcctggccgattcggccgacaagcgccgcaccgacgtgctggtgcacgcggccgccgccggcgaatccagccatgaggctggtcccaccgccagctccaccggccgtccggccaatgcggtgctggaccgccgcctgcgcgcgttgcgcgaggatgcggccaagatcgcgctgcgcacgggggccatcgggcgcgccatacgggcgcgcgtctgagcctggtggcttacggcgcctcgggcagctcttcctcgggcagtgtcagcatgccgctgttgtagcggtactcgtagatctcgccgtagcgcccccagccgatcgccacgctgagcacgcgctcggcctcggcgggcttcaggaaccgctccagttcgtgcagcacctgttcttcgcggatctcgccggcctcgctggccaccagttcgcggcggatatgcgcggccagtgcgacgttgcccagcaactgctggccgaacatcaccttgcgttgctgcggcccggcggcgtaccaggcgcggccggccccggtggcggcgatgtcgccgcgctcgatcgacaccagttgcaccagctgcagcgcttcgcacgcaggcagcagttcgtcgtcggtgaggccggcttcgtcggccaggtggggcaggtcggcgcggcagttgaagggtgcctcgcacagcaggtcgaggatcgcttccatctggctgatgtcggcgtccggcagccggtaggcgatctggcgcgcgggcgcttgcgcgggcaggcgcgcttccgcggcgggggcggtcatcagcgcgtagatctcgtcgaccagcgcgcgcacctgcgcgctgtcgcggttgcgcggacgcggcagcgccactggcacctcggcgcggatgcggcccgggtcgctcgacaggatcacgatgcggtcggccatcatcactgcctcttcgatattgtgcgagacgatcaggatgctcctgatattggcacggccgctttcccacagcgccagcatctcgtcgcgcagggtctcgccggtcagcacgtccagggccgagaatgcttcatccatcagcagcaggtccggctcggtcaccagcgcgcgcgcaatgcccacgcgctggcgcatgccgcccgacagctcgcgcggcagtgcgctgttgaagccggccagcccgatcatgtcgatcgcggcctcggcgcggcgctcgcgctcggccctgggcacgccctgggcctcgagccccagctcaacgttctgctgcaccgtcagccacgggaacagcgcgaacgactggaacaccatggcgatgccctcggcggtgccggccagccgttcgccgcgaaagtccacctcgccgcggtcggcgccgaccagcccggccatgatgcgcaacagcgtggacttgcccgagccggacttgcccagcatggcgacgatctcgccctcgcgcagcgtcaggtccacgccttcgagcacggcacggtcgctctggctggcggtgcggaagatcttgccgacgccgcgcagctcgatcacggcgggggcggcggtggatgcaatgttctctgccatcgttgccttacaagcgggtgcgctcttgcgcgagttgatacaggcggttccacagcagccggttgaagccgaccacgaacagcgccatcacgactatgcccagcgcaatgcgcgggaagtcgccgcgcgcggtggtctcggcgatgtagctgccgagcccggtggcgacgatggtgcggtcgccccaggtcacgtactcggacacgatgctcgcgttccacgagccgccggcggcggtcaccagcccggtcagcaggctcgggaacaccgcggggatcaggaagcgcttccacagcagccagccacgcaggccgaaattgcgcgtggcgagcttcagttcggtgggaatgcccgacgcccccgcgaccacgttgaacaggatgtaccactgcgtgccgaagatcagcagcgggctcagccagatctccgggttcagcccgaagcgcacgatcagcatcaccgccagcgggaacatcaggttggccgggaaggcggccaggaactgcgcgatcggctgggcaatgcgcgccagttccgggctcaggccgatgcggatgccgatcggcacccacaccagcgccgccagcgcgatcagcaccaccacgcgcaccatcgtgatcgtgccgagccacagcacatggccgacttcggcccagcccacctcgctgtgcacgaagtagcccacgcgcagcaacgcggccaatgccaccagcacgatcacggcgtcgcgcacgcggccgaaccaaagcgcgcgccgcggattgtccggctgcgccggggcctgcccgcggcgcgcgccccacgccagcgtgcgcccggccagcgccgccgtctgcgccagcactgcacccacccacgccgagcggcgcagcaggtccagcagccacgactgcggcagcttgtcctgcgcctgggtctcgaagcggaagcggtcggcccatgccaccagcgggcggaacagcagctggtcgtacagcaggatgcccgccagcatcgccaggatggcccagccgatcgcggccaggtcctgctgctggatcgccagcgcgatataggagccgatcccaggcaggcggatgtcgtggccggataccgagatcgcctcggacgccaccacgaagaaccagccgccggacatcgacatcatcatgttccacagcagccccggcatggcgaacggcacttccagccgccagaagcgctgccacggcgacagccggaacatggccgccgcttccatcaaatcgcccgggatggtgcggaacgactggtacaggctgaacgccatgttccacgcctgcgaggtgaagatggcgaagatcgccgcgcactcgacccctgcgatattgccgggaaagagggcgataaagccggtcacggtgatcgacaggaagcccagcacgggtatcgactgcaggatgtccagcgccggcaccagcaccttctccgccgtgcggctctttgacgccagcgcggcaaacgccagcgagaacagcagcgacgccgccagcgccgccagcatgcggatgctggtgcgcatcaggtagtagggcaggtaggccacgtccaggtgcaccgccagctgctggtcgggctggaacggggcgttcatctgctgcgcggtgaacgcgatcatcacgatcacggccaggatgatcggcagcagggccaggtcgaagcggttgggcggggcgcgcagcagctggctgtcaaagccaggggcgggcggggccgcgcggcggtcggcgggtggcatcatgggcgcttctcgggctgtatcgagcttggatggcaaggcttgtggcccagccctgattcgcggccctggcggacaatggcaaagcccgcatgccgccggcttcacgccgggcggcgcgcatccctttgtaacgcccggcatggcggtctagtttacttggtgtggatgacagatcgcgcacgctgccggcgtgcgcccaaagggaaaagccatgaagaaggaaacctggcgcctggtcgcgcatgggcgcgtgcagggcgtgggctaccgcgccgcctgcgccgacgcggcggacgaccttgagcttggcggctgggtgcgcaaccggctcgacggcaccgtcgaggtgatggcgcacggcacggtcaggcagctcgaagccctgcaggcgtggatggaacagggcccgccggccgcgcaggtgacgctggtcgaggtcgggcctggggaaggggagtttgccggtttcgaattccggccgacgatctgatggactaggccgcggtccagtcgaccggcgtgcggccgttcgcttccagccagcggttggcctcgcggaagtgcccgcagcccaggaagccccggtgcgccgacagcggcgacggatgcggcgcttccagcacgcagtggccggcgcccagcagcggcttcttggcctgcgcgtggctgccccacagcatgaacacaagactcgggcggctggcggcgaggttctggatcaggcaatcggtgacggcttcccagcctcgccgcgcatggctggcggcctggccctgttccaccgtcagcacggtgttgagcagcagcacgccctggcgcgcccagccttccaggttgccggaggcgcgcggcgcgcagttgtcgttggcaccgaactccgcggcgatttccttgaagatgttgcgcagactgggcggcactttgatgccttccggcaccgagaacgccagcccgtgcgcctgcggcagctcaacgccgccgaccgtgccggtgccgtggtaggggtcctggcccaggatcaccaccttgaccgcgtcgggcggggtcaggtgcagcgcgtggaagacatggtgcgggaataccggcttgccggcggcacgttcgccgtcgacaaaggcggccagctcctgccacgccggcacgcggatgcacgggtccagcaatgtgcgccaggcggcgggcagggcgtcggcctgggcctgcaggctggcggcaggggacggttcgccggggacgcggggggcttcggcggcgaagagatcggcttgcatgtgtaaggaaagcttggcgggaaaaccgcgattatgaggccttgctttcggcgattcccgccaggcggtagccgcgggcggccttgctaaggtccgacggtgccagcgcggcaacggtggccagccgcgcggcaaaggcgcgcagggcatcggccgcgtgcgcggcgtcgccatcgagccattccagttcgagttcctggatgggttcctgcgcggcgctggccggcgcggcgatggtgccggtgtcgagcgcggcctcgatgcgggcgccgtcctgcgtgaccagccaggtgcggcggacgaagtcggtgcggaacaccggtgccagccggccgatcagtggcgcgagcacggtttgcgcttccgcgggaaaggtttgcagctcgatggcctcgccggcgatctccgtctcccattcatggcgcgtggccaggccgccctggctgctgccggcggtcttcagcgtctgcagccattgcgcgcccttgcggcgcagccgcagcgcggcgcgcgcctgtgccaggtcacgttgcggggtatcgaggtagacgttgagcagcgtggcttcgccctgcggggcgccgttggcgtcgagccaggcggccagcggggccagcgcgtcgtcggggacggcgagtttcagttcgatttcctggggcatggcagcaggcgatttcagagggttggcgagggcgatgtctttccagtcaccgctagccggccccctctcccgcttgcgggagaagggagcaaaccgccagcgtgcgtcggcaggcgttagctcaggcaaacagccgtgccagctccacgcccggatccggcgcccgcataaacgcttcgcccaccaggaacgcatgcacgttggcatcgcgcatgcgcttcacatcggcctggccgaggatgccggactcggtcaccaccagcttgtcggccggcatatgcggcagcaggtccagcgtgttgtccagcgacacctcgaaggtgcgcaggttgcggttgttcacgccgagcagcggcgttttcaggcgcagcgccgcgtcgagctcgtcgtcgccgtgcacttccaccagcacatccatgccgagctcaagcgcacaggcttccagttcggccatcaggcccgggtccagcgcggcgacgatcagcaggatgcagtcggcgccccaggtgcgcgcttcatacacctggtacaggtcgaccatgaagtccttgcgcagggccggcaatgggcaggcgccgcgggcgcgcttcaggtagtcggcgtgtccctggaagaagttcacgtcggtcagcaccgataaacaggcagcgccatggctggcgtagctttcggcaatggcctcgggcacgaagtgctcgcgcagcacgcccttggacggcgatgccttcttgacctcggcgatcacgccggcctggccggcggcgatcttctcgcgcagcgcgcgctcaaagccgcgcggtgccaggcccggctcagtgcgcaggctttcggcctccgcgcgcaggctgggcaggtcgcgcttcttgcgtgcggcggcgacctcgtcggcctttacggccaggatcttttgcaggatgtcggacatattcgcgtctcttacttgaactgctgggtggcgcgcacgaactggtcgagcttctcttgcgccgcgccgctggcaatcgcctcgcgcgcgcggcggatgccgtcttcgacggagtcggccacgttggcggcgtacagcgcggtgccggcgttcagcgagacgatctcgcgcggcgtgcccggtacgttggtcagcgcttcaagcagcatttccttcgactccgtcgcatcggccaccttcaggccgcggttggagatcatctgcaggccgaagtcctcggggtggatctcatattcgcgcacctcgccgtccttcagttcgcccaccagcgtggcggcgccaagcgaaacctcgtccatgccgtccttgccgtacacaacgatggcatgcttcgcgcccaggcgctgcatcacgcgcacctggatgccgaccaggtcgggatggaacacgcccatcaggatgttgggcgcatcggccgggttggtcagcgggcccaggatattgaagatggtgcgcacgcccatctccttgcggatcggggcgacgttcttcatcgccgggtggtgcgtgggcgcgaacatgaagccgatgccggtctcttcgatgcactggccgacctgctcgggcgtcagcatgatgttcacgcccagcgcttccagcacgtccgcgctgcccgacttggagctgacgccgcggttgccatgcttggcgatcttggcgccggcggcggccgcgacgaacatcgatgcggtcgagatattgaaggtgtgcgagccatcgccgccggtgccgacgatatcgacgaagttctcgcgatcggccaccggcaccttgttggcgaactcgcgcattacctgcgcggcggcggagatctcgccgatggtttccttcttgacgcgcaggccggtcaggattgcggcggccatcaccggcgagatctgcccctgcatgatctgccgcatcaggtgcagcatctcgtcatggaagatttcgcggtgctcgatgcagcgcgtcagggcttcttgcggcgtgatcatggcgttctcgttgacagtctggatggcgtggtgcgggctggaaggtgcggaatcgagcagtctcatcgcggcgccttgacgaagttggccagcagcgcatggccatgttcggacaggatcgactcgggatggaactgcacgccttcaacggcgagcgtcttgtggcgcacgcccatgatctcgccgtccggggtccaggcggtgatctccaggcaatcgggcagggtttcgcgctcgatcgcaagtgaatgatagcgcgtcacgtcgaagtgcctgggcagtccggcgaacacgccttgctgcgtggtctcgatggtgctgaccttgccgtgcatcacctgcttggcgcggatcaccttgccgccaaaggcctcgccgatggcctggtggcccaggcacacgcccagcagcgggatcttgccggcaaagtgctgcagcgccgccaccgagatgccggcttccttcgggctgcacggcccgggcgagacgcagatgtggtccggcttgagcgcctcgatctcctcgatggtgatctcgtcgttgcggtaggtgcgcacgtcctcgcccagttcgccgaaatactggaccaggttataggtgaacgaatcgtagttgtcgatcatcagcagcatggcgtctgtctcctgttctctcagatgtcggagtccaggccatcctggacctgctcggcggcgcggatcacggcgcgcgccttggcttcggtttccctccattcggcttcgggatccgaatcggcaacgatgccggcggcggcttgcacgtagaggttgccgtccttgacgatgccggtgcggatcgcgatcgccaggtccatctcgccgccgaacgacaggtagcccaccgcgccgccatagatgccacgcttgcgcggttccagctcgtcgatgatctccatcgcatggaccttgggcgcgcccgacagcgtgccggccgggaaggtcgcgcgcagcacgtccaggttgctgatgccctcgcgcagcgtgccttcgaccgagctgacgatatgctgcacgtgcgagtacttctcgatcaccatcttgtcggtgaccttgaccgaaccagtttcggcgatgcggccgatatcgttgcgcgcaaggtcgatcagcatcacgtgctcggcgatctccttcggatcctgcagcagctcggtggcgagctgggcgtccttctccggcgtattgccacgcgggcgcgtgccggccagcgggcggatggtgacgatgtgttcgctgcgcatgtcgccgttggtgccgaccttgcgctcttcctggcgcaccaggatctccggcgaggcgcccaccacctggaagtcgccgaagttgtagaagtacatgtacggcgacgggttcagcgaacgcagcgcgcggtacagcgaaagcggcgcgtcacggtaaggcttgaccaggcgctgcccgatctgcacctgcatcatgtcgccggccatgatgtattccttggccttgtgcaccgcggccaggtagtcggccttggcgaattcgcggtagacctcggtctgcaccgacgggctggtgaccggcacatccaccggctggcgcagcttcatgcgcagctcgcgcaggcgctggcgggcgcgcgaataggcttccggcgtggtcgggtcggcgtagacgatcaggtagagcttgcccgacaggttgtcgatgacggccagttcctcgcacagcagcagctggatgtccggcaggttcaggtcatcgggcttgtgcgtgtcggcgagcttcttctcgatatagcgcaccgcgtcgtagccgaagtagccggccaggccgccgcagaagcgtggcagccccgggcgcagcgccaccttgaagcgctgttcgaactcggcgatgaagtcgagtgggttgccttcgtgggtttccaccaccttgccgtcggtcaccacctcggtgcggttgccgaaggcgcgcagcagcgtgcgggcatgcaggccgataaacgaaaagcgcccgaagcgctcgccgcccaccaccgattccagcaggaaggtgttgacgccgcgcgtctgcgactgggccagcttcaggtacagcgacagcggcgtttccaggtcggcaaaggcctcggcgatcagcgggatgcggttgtagccctggtcggccagcgatttgaattccagttcggtcatgtcggtcctcttgtgcggcgcgcgctgcgcggtggaggggcgcggcgccgcttgtcggcaatcaggctggagcgaatggatacccgccccgttggcgggccgtggtgcaagcggcttgcggacaagactgcacacggccggggaagggcgtgcggcgcgttcttgagctaaacgtagcacacgaatatggcggctacgctggcttgcggcgggttttggtgggaatgcccggcagctgggccggtgtggcgaggccctcgggtcgagggctcgtcagcagactcgcgaacgcactttacgcctgttgggaggcgcgccagcgacgccagggccaagcctgccgatcactgccagaagagatgcgtttgcggttgagaaacatgaaatgtttggggtttggtcgggatcgacgaaattcggactatcgatgacctgcccagtgtgctgcaaacagcgctgcggcgtgggcaatggagtcgactataccatcggcgtcaacggcttgtacagggttgccatggttgtagccatagggcaccagcagcacgcccatgccggccgcgcgggccgcctgcgcgtcgttttccgagtcgcccagcgccgccattgccgacggctccagcccgaaggcgtcggccactttcagcagcgggaaggggtcgggcttgcgcagcgggaaggcgtcgccaccgtagaccagctcgaagtactgggcgaggccggtcttggccagcagcggctcggtgaagctgtagggcttgttggtcacgcaggccaggcgcagcccggccgccttcatcgccgccaggccttcgcgcacgccggggtagacctgcgagaactggccgttgatgcggatgtactcgcggtcgtacagcgcataggcgtcggcgaacaggctgttggcgtgcagcggcgagaagcgcgcgtccagcacgcgccggatcaggttttccgagcccttgcctacatagctgacgatctccgcctccgacatcggcgctgccggccccaggttggggtgctggcggcccagcgccagcagcatggcgttgatcgaggcgtggaagtcgcccgcggtgtcgaccatggtgccgtcgaggtcgacgatcacgccttcgatgccgcgccagtcgttgcggcgcaggaacacgccctcggtcattgcccggccttggccagttcgccgcgcagcgccgagatgatgccgcggtaaccgccgtccgcatcgggcttgccgaacacggccgagcccgccacgaaggtgtcggcgccggccgcggcgatctcggcgatgttgtctaccttcacgccgccgtccacttccagcaggatggtgcggccggtgcgggcggtgtactcatcgatgcgctggcgcacggcgcgcagcttgttgagcgtctcgggaatgaacgactggccgccgaagcccgggttgaccgacatcagcaggatcacgtccaggcggtccatcacgtggtccaggtggtgcagcggcgtggccgggttgaacaccaggccggcctggcagccgtggtcgcggatcagcgcgagcgagcggtccacgtgctcgctggcttccgggtggaaggtgatgatattggcgcccgccttggcaaagtccgggatgatccggtccaccgggcgcaccatcaggtgcacgtcgatcggcgcggtcacgtgcgggcggatcgcctcgcacaccagcgggcccacggtcaggttgggcacgtaatggttgtccatcacgtcgaagtggatccagtcggcgccggcctcggtcacgcggcgcacttcctcgcccaggcgggcaaagtcggcggacaggatggacggggcgatgcggtaggtgggcgtgctcatgtcggcggctaggaggtggggtgctggggaatgctgttttttgcgtctctggcgcgcccaggggcgggcgccagaggggatcaggcggggcgtccggcgcggcccggacctgaaagggctatattctaccgctgccccggcgctcggtgatcttgcccgtgctcttgcccgtgccgcggccatcccgcacaatgcggctacccacttccctgcctggcgcctcacgccggccctgcccacgatgagcgagtacgctttctccgtctcggtacgcacccagtacctgccggaccagtcagaacctgagcgcgggcgccatgccttcgcctacaccattaccatccacaataccggcgaggtggcggcgcagctgatctcgcgccactgggtcatcaccgacagcgacaacggcacgcaggaagtggcgggcctgggcgtggtcggccaccagccgctgctcaagccgggcgagcatttcgaatacaccagctgggccaccatctcgaccccggtgggatcgatgaagggcgaatacttctgcgtggccgaggacggccaccgcttcgaggtgccgatccctgaattcgcgctggtgctgccgcgcatgctgcactgaccctgccgggaacctattggcgcgatgcgctgtcctgatcctgcggcggcgcttcagcggcgccctgcgccggctggcgcgacggatgctcggacggggcgcgcgtgggacgcgggttcgttttcgccgtgcccatggtccagaccacgataaagatcagcaggaacagcgccacgccggcttccagggcgaacagcagcatgggatgggcttcgaagaacttgctcatggcggatgcagcgcaggcccgcgggggcgcaggcggtggttgaaggatgacggtgggattgtaggggcaatcggccccgcaagctgcgccggcccggattttgaacaatagcaagatggcatacgcagactctttcccgatttccccggtttctccctggcgctcgctgcgcattcgcggctggctggcgctgtccggcgcggccgtgctgctggccggctgcatgagcggcccgccgccgcgcatcgagaccggcccggccggcaccacgccgccgacggcctcgtcgcagaaaggcagtctgcaggccgccagctgggccgagatcggcggctgggcccaggacgacgtgcgcgccgcctggcccgcgctgcaggccagctgccaggcgctgaagaagcgcgccgagtggagccgcgcctgtgccgccggcatgatggtcgatgccggcaacctcaacgccatgcgcgcctatttcgaaagcaacttccagccgtaccgcgtggtcaacggcgatggcactgactacggcctgatcaccggctactacgaaccgatcctgcacggctcgcgcacgcgccagggcaagttccaggtgccgctgtaccgcaagccggcgcagttcggcaaccgcccgctgccggcccgcgccgagctgctgcagaacccggccatgcgcggcagcgagctggtctgggtggatgacgcggtcgaggccgccttcctgcagatccagggctcgggccgcatccgcatggccgatggcagcatcatgcgggtgggcttcggcggcaccaacgaacagccgttccgctccttcggcaaatggctgctggaccgcggcgagatcacgccggcacaggccaccatgcagggcatcaaggcgtgggcgcgcgccaacccgggccgcgtcgacgagatgctcaacatcaacccgcgctttgtcttcttccgcgagctgccggccaacaacgacggcccggtgggcgcgctgggcgtgccgctgaccgcggagcgctcgatcgcggtcgacccggccaccatcccgctgggggtgccggtattcctgtcgaccacgcgcccgctgtcgaccgagccgatccagcggctgatgttcgcgcaggacaccggcagcgccatcaagggcggggtgcgcgcggatttcttctggggtgcgggcgatgccgccggcgagaccgcgggccgcatgaagcagggcggccgcatgtgggtgctgatgccgcgcagctgacctcggcaacgcaaaaagggcgccatcgcggcgccctttcttcatggtggacagccctcagcgcgggcgctggtcgacgatccgccgcgccttgcccaccgagcgctcgacgccgccctccggcagcacctcgatgccggcggtgacgccgatataggccttgatctcctgcgccagccgctcgcgcgcgccttgcgccagcgcgggctcgctgccgtgggcgcattccacgcgcaccgtcagcgtgtccatgtggccgtccttggccagcacgcactggtagtgcggcgccagctcggcgtgcttgaggatcagttcctcgatctgcgacgggaacacgttgaccccgcgcacgatcatcatgtcgtcggtgcggccggtgatcttctccatgcggcggaatgccgggcgcgccgtgcccggcagcagccgggtcaggtcgcgggtgcggtagcgcaccacaggcatcgcctccttggtcagcgaggtgaacaccagctcgccgaactccccgtcgggcagcactgcgccggtgtcgggatcgataatctcggggtagaaatggtcttcccagatggtcggcccgtccttggtctcggcgcactcattggccacgcccgggcccatcacctctgacaggccatagatatcgactgccgagatgcccatgcgcttctcgatcgccagccgcatttccggcgtccacggctccgcgccgaagatgcccacgcgcagcgagctgctggccgggtcgatgccctggcgctcgaactcgtcggcgatcgccagcatatagctgggcgtcaccatgatgacctcgggcttgaagtcctggatcagctgcacctggcgctcggtctggccgccgccgaaggggatcgcggtcaggccggccttttccacgccgtagtgcgcgcccaggccgccggtgaagaggccgtagccgtagctgatatgcaccttgtcgccgcgccgcgcgcccgaggcgcggatcgagcgcgccatcaccgtggcccagttgtcgatgtcctggagcgtgtagccgaccacggtgggcttgccggtggtgccggacgaggcgtggatgcgcgccacgcggtcctgcggcaccgcgaacatgccgaacgggtagttgtcgcgcaggtcctgcttgctggtgaacgggaagcgcgccaggtcggccagcgaatgcagctggtcggggtggaccccggcttcgtcgaacttgcggcggtacaccggcgaattggcgtaggcgtggttgagcgaccatctcagccgctccagctgcaaggcctgcagctcggcgcggctggcggtctcgatcgcatccaggggcagatcggtcaggcgcgtgctcatgtcgtctcctgcacgggggcgtttatcttaagtatcttgccggatttgctcaggtgccttccgtcccttccggcggcggcaccacatgtcccctgatctgcgccgacttgccgcggaacatcgccaccacctggcccgcggcgttggtcacgcggatatcgtagatgccgtgccggccggacaggacctgctcggtggcctcggcggtcagcacgtcgccgccgtgcacgggcttgaggaactcgatgctgcaacctgccgccacggtgttgatgttatggctgttgcaggcaaaagcgaaggtcgaatcggccagcgtgaacatcaggccgccgtggcagatgccgtgcccgttgaggaattccttgcgcaccggcatggtcagccgggcgtagccgggccgcacggcctcgaccgtgatgcccagccagcggctgcaggtgtcggcttcatacatggcggcggcggccgcttcggcgagggcctgggggtcctgtttcaagctggtctcctatatagagtggcgggcaggcccgcgcggcttacttgccggtgaagtgcggggcgcgcttttcgaggaaggcgttgacgccctcagcatagtcggcggactggccgagctcgcgctgcaggtcgcgctccaggtccagctgggcgtccagcgtggcggtggcgctggcatgcatggcgcgcttgatcgcggccagcgcgcgggtcggctgcccggccaggtgcgtggccagcgccagcgcctgttccggcagcagcgggtcgtccatggtctcccagaccagcccccatttctcggcctcttcggcgctcagccgctcgccggtcatggccaggcccagcgcgcgcgccatgccgatgcgcttcggcagcagccaggagccgcccgaatccggcaccagcccgatcttgacgaaagcctggataaagctggccgagcgcgccgccagcaccatgtcgcaggccagcgccaggttggcgccggcgccggccgcggtgccgttgaccgcggccaccactggcagcggcagggcctgcagccggcggatcagcgggttgaaccaggtatcgatcagctcgcccaggtcggtcatgtgccccggcgtgaaatccaggtcggccaggtcctggccggcgcagaagccacggcccgcaccggtcagcagcagggcgcgcgcgccgccggcctcgacatggtcgagcgcctgctgcagcgcctggtgcatcgcgcgggtgaagctgttgagcttgtcggggcggttcagggtgatcacggccaccgggccctgccattgcagcaagaccgggccggcatcgatgctgaccggctggccagcggaggtggacatcgggggcattgggttgtctcctgccggatattttgtcgcggtcggcgcgggcggctgttgtcgacggcgcctcttaaataaaccgaccagtcggtcggcaaatgttagcactatttttgggctgccggttggcacgtggcttccaaggccggcagggtccgcaatgccgggcgcgggcgtcgctctataatcgcgctgccaacaacaatctgaaacctgccggccgacatctgtgtgcggatcccggcatgctcgcctattcgcattggaattcctatgaagaagatcgctgcattactcctgatttcgtccgtggcgctgtttgcggcgtgcggcaagaaagaagcggcctccgctgccggcgccgacacggccaccaagatcattgtcggcctggacgacaacttcccgcccatgggttttcgcgataacaacaacgagctggtcggcttcgatatcgacatggccaaggaggccagccgccgtctcggcatgacggtcgagttcaagccgatcgactggagcgccaaggaggcggaacttaacggcaagcgcgtggatgtgctgtggaacgggctgaccatcaccgaagagcgcaagaagaacatcagcttcaccgcgccctatatgaccaaccaccagatcgtcatcgtcggtgccagctcgccggtgaaagccaaggccgacctggccggccgcatcgtcggcgcgcaggacggcagcagcgcggtggatgcgatcaagaaggaaagccaggtcgccgccagtctgaaggaactcaagaccttcggcgataacgtgacggcgctgatggacctgtcgaccggccgccttgacgcaattgtggtggatgaagtggtaggccgctacctgatcagcaagcgtgccggcgaatacaaggtgctggaggaaaacttcggcacggaagaatatggcgtcggcgtgcgcaaggatgacgccgagctgctcggcaagctcgacaagaccctggcctcgatgaagcaggatggcacggcagcccgcatcgccacccagtggttcggcactgacatcaccaagtaatccagacgctgcgtgacgccctgcgccgttcaggcaggggccgcgccatgtccggaccccgggtgccgtcccggcgcccgggatcccacctccttcttgtttcgcgcgagcatggactacgtcttatctcttctggcgccattggcgcagggtgcgcaagtcacgctcacactattcgccatcacgctcgccctgtcggtgccgctggggctggcgctggcgctggcacgcatctcgtcatggccgtggctgagcgggctggtcaatggctatatctggctgatgcgcggcacgccgctgatgctgcagatgctgtttatttatttcgcactgccgttcgtgcccgtcatcggcgtgcgcctgcctgactttcccgcggcggtggtggctttcgccctgaactacgcggcctatttcgcggaaatcttccgcgccgggatcaagtcggtcgatcgcggccagtatgaggccagcaaggcgctgggcatgacctattttcagaccatgcggcgggtcgtgctgccgcagatggtcagccgggtgttgccgccggtcagcaatgaaaccattacgctgatcaaggacacgtccctgatctacgtgctggccctcaacgatattcttcgcaccgcgcgcggcatcgtgcagcgggatttcaccaccacgccttttctggtcgctgcgctcttctatctggtgatgacgctgattctgacctggttcttccagaatcttgaaaaacgctatgccaaacatgatgactagcccgaccggcgccaattcccacaatgcgcccggcatcatgatcgctgcgcgggatctgttcaaatcgttcgggccactggaggtcttgcgcggtgtctccctgaccttgcgcaagggggatgtcaccgcggtgatcgggccctcgggctcgggcaagagtaccttgctgcgctgcctgaatcatcttgaggtgattgaccgcggcacccttgaaatcgaaggcgaggcgctgacggccgccggccctgacggcacagccagatatgtgccggacgctgaagtgcggcgcatctgccggaagatgggcatggtgttccagtcgttcaacctgtttccgcatatgacggtgctgcagaacatcatcgaagcccccatgaccgtcaagggactggcgcgcgacgcggtggtgcccaaggccgaagagctgctgcgcaaggtcggcctgctggccaagcgggacagcttcccggcgcgcctgtccggcggccagaagcagcgggtggcgattgcgcgggcgctggccatggagcccgacatcatgctgtttgacgagccgacctcggcgctggacccggaactgaccggggaggtgctgcgcaccatgcggcaactggccgaagaacatatgaccatgctggtcgtcacgcatgagatggggtttgcgcgggaagtggcaaaccacgtcgtgttcatggatgagggcaggattcttgaggaagggtcgcctgaggaagtgttcgggaccccagctcacgcgcgcacccgcgaattcctggcgcacatgctctagggggcgcctgcgccgccacgccacaacaggtggcagaatagcccgcagccggtggcgacagtgccatccgcctgcaaatacataggagaagacatgccgtacgaaaacatcctggtcgaaacccgtggccgtgttggcctggtcacgctgaaccgcccgaaggccctgaacgcgctcaatgacgcgctgatggacgagcttggcgccgcgctgaccgccttcgaccaggatgagggcatcggcgccatcgtcattaccggcagcgagcgcgcctttgccgccggcgccgatatcggcatgatggccaagtattccttcatggatgtgtacaagggcgattacatcacgcgcaactgggaaaccatccgcaagatccgcaagccggtgattgccggcgtggccggctatgcgctgggcggcggctgcgagctggcgatgatgtgcgacatcatcatcgcggcggattcggccaagttcggccagcccgaggtgaagctgggcaccatgcccggcgccggcggcacccagcgcctgccgcgcgcggtgtccaaggccaaggccatggacctgtgcctgacctcgcgcatgatggatgccgccgaagccgagcgctcgggcctggtatcgcgcgtggtaccggccgacaagctgctggacgaagtgctggcggccgccgaaaccatcgccgggttctcgctgccggtggtcatgatgatcaaggagtcggtcaacgccgcctacgagaccacgctggccgaaggcgtgcacttcgagcgccggctgttccatgccaccttcgccagcgaagaccagaaggaaggcatggctgctttcgtcgagaagcgcagcccgaatttccagcatcgctaaggcccggatcagggaatacccgagggcagtgcgggggtattatgtttctcccgcactcgtcatttcggggatttcctttgccactcaatggcttacgacataatccccggaacccctagcggatcgttgtgacaaagttgttgcaaggtgcgcgaatccggcctaatattcgccccctcgcaacacacaacgcagcgctgcaaagcagacgcagcaagggatgcggggtcgaccgggatggttggcgcagcgaagttggcgcgctggccgcagcaaaaaaagatgctgaaacggttgacgaaacgaagaaagctctgcataatctcgtttctctgctgcagacaacgcagcggcgctgaacggcaaagccggcggcgaagttctttaacaaccaaacaaccgataagtgtgggcgctgggtagcggacgccgctgtcttcggacagtgttgcttcacaagttatacagtgctcgcacagcaaaacgtgactggatcttcggatctggtcagtcagttttctgagagtgagcgaccgctcgaaagagcgaggaccttcgggtccacacagagattgaactgaagagtttgatcctggctcagattgaacgctggcggcatgccttacacatgcaagtcgaacggcagcacgggcttcggcctggtggcgagtggcgaacgggtgagtaatacatcggaacgtgccctgtagtgggggataactagtcgaaagattagctaataccgcatacgacctgagggtgaaagcgggggaccgcaaggcctcgcgctacaggagcggccgatgtctgattagctagttggtggggtaaaggcctaccaaggcgacgatcagtagctggtctgagaggacgatcagccacactgggactgagacacggcccagactcctacgggaggcagcagtggggaattttggacaatgggggcaaccctgatccagcaatgccgcgtgtgtgaagaaggccttcgggttgtaaagcacttttgtccggaaagaaatggctctggttaatacccggggtcgatgacggtaccggaagaataagcaccggctaactacgtgccagcagccgcggtaatacgtagggtgcgagcgttaatcggaattactgggcgtaaagcgtgcgcaggcggttttgtaagacaggcgtgaaatccccgagctcaacttgggaatggcgcttgtgactgcaaggctagagtatgtcagaggggggtagaattccacgtgtagcagtgaaatgcgtagagatgtggaggaataccgatggcgaaggcagccccctgggacgtcactgacgctcatgcacgaaagcgtggggagcaaacaggattagataccctggtagtccacgccctaaacgatgtcaactagttgttggggattcatttcttcagtaacgtagctaacgcgtgaagttgaccgcctggggagtacggtcgcaagattaaaactcaaaggaattgacggggacccgcacaagcggtggatgatgtggattaattcgatgcaacgcgaaaaaccttacctacccttgacatgccactaacgaagcagagatgcattaggtgcccgaaagggaaagtggacacaggtgctgcatggctgtcgtcagctcgtgtcgtgagatgttgggttaagtcccgcaacgagcgcaacccttgtctctagttgctacgaaagggcactctagagagactgccggtgacaaaccggaggaaggtggggatgacgtcaagtcctcatggcccttatgggtagggcttcacacgtcatacaatggtgcgtacagagggttgccaacccgcgagggggagctaatcccagaaaacgcatcgtagtccggatcgtagtctgcaactcgactacgtgaagctggaatcgctagtaatcgcggatcagcatgccgcggtgaatacgttcccgggtcttgtacacaccgcccgtcacaccatgggagtgggttttgccagaagtagttagcctaaccgcaaggagggcgattaccacggcagggttcatgactggggtgaagtcgtaacaaggtagccgtatcggaaggtgcggctggatcacctcctttctagaggcttgtgtctcaagcctagcgttcacacttatcggtttgtttgctgttacagccaagggtctgtagctcaggtggttagagcaccgtcttgataaggcgggggtcgtaggttcaagtcctaccagacccaccaagttatccggaagggggattagctcagctgggagagcacctgctttgcaagcagggggtcgtcggttcgatcccgtcatcctccaccactgcctggtaccttggattggttgtcaaatgaaagcgcatcgcgacgatgagtggcgagtgtttccatttggcattgccaagcgatcgcaagatcggctgttctttaaaaatatgggatgtagtaaaggtgtcgcgcgagcgttgatgagacgctgcagtacaagacgcgataccgggttgtgattgtatcaaccaaaatgtatttaagtgatcgaaagatgacttggaatacggcacaaatgcgagaactcatcctgtagcgaggtttcgagcaatcgagacacactcgttatagggtcaagcgaacaagtgcatgtggtggatgccttggcgatcacaggcgatgaaggacgcggtagcctgcgaaaagcttcggggagctggcaaacaagctttgatccggagatgtccgaatggggaaacccggcccgaatgggtcatcccacactgaatccataggtgtgggaagcgaacgcggcgaactgaaacatctaagtagctgcaggaacagaaatcaaccgagattcccaaagtagtggcgaacgaaatgggaagagccttgtactctttagcagtggtgttagcagaacgggatggaaagcccggccctagcaggtgatagccctgtatgcgaaaacacgattgtggaactaggtgtacgacaagtagggcgggacacgtgaaatcctgtctgaagatggggggaccatcctccaaggctaaatactcgtgatcgaccgatagtgaaccagtaccgtgagggaaaggcgaaaagaaccccgggaggggagtgaaatagatcctgaaaccgcatgcatacaaacagtcggagcctcgtaaggggtgacggcgtaccttttgtataatgggtcagcgacttacattcagtggcaagcttaaccgattagggaaggcgtagcgaaagcgagtccgaacagggcgttgagtcgctgggtgtagacccgaaaccagatgatctatccatggccaggttgaaggtgcggtaacacgtactggaggaccgaacccactaacgttgaaaagttaggggatgagctgtggataggggtgaaaggctaaacaaatctggaaatagctggttctctccgaaaactatttaggtagtgcctcgtgtctcaccttcgggggtagagcactgtcatggttggggggtctattgctgattaccccgccatagcaaactccgaataccgaagagtgcaatcacgggagacagacatcgggtgctaacgtccggtgtcaagagggaaacaacccagaccgccagctaaggtccccaaatatagctaagtgggaaacgaagtgggaaggctaaaacagtcaggaggttggcttagaagcagccaccctttaaagaaagcgtaatagctcactgatcgagtcgtcctgcgcggaagatgtaacggggctaagctatataccgaagctgcggacgcacagcaatgtgcgtggtaggagagcgttctgtaagcctgtgaaggtgtcttgtaaaggatgctggaggtatcagaagtgcgaatgctgacatgagtagcgataaagggggtgaaaggccccctcgccgtaagcccaaggtttcctacgcaacgttcatcggcgtagggtgagtcggcccctaaggcgaggcagagatgcgtagctgatgggaagcaggttaatattcctgcaccgtcgtatgatgcgatggggggacggatcgcggaaggttgtccgggtgttggaagtcccggtccctgcattggagaaggcgctcaggcaaatccgggcgcgggattcaaggatgcggggcgagcggcctagtgctgcgaagcaattggaagtggttccaagaaaagcctctaagcttcagtcatacgagaccgtaccgcaaaccgacacaggtgggcgagatgagtattctaaggcgcttgagagaactcgggagaaggaactcggcaaattggtaccgtaacttcgggataaggtacgccctggtagcttgactggcctgcgccagaagggtgaaggggttgcaataaaatggtggctgcgactgtttaataaaaacacagcactctgcaaacacgaaagtggacgtatagggtgtgacgcctgcccggtgccggaagattaaatgatggggtgcaagctcttgattgaagtcccggtaaacggcggccgtaactataacggtcctaaggtagcgaaattccttgtcgggtaagttccgacctgcacgaatggcgtaacgatggccacactgtctcctcccgagactcagcgaagttgaagtgtttgtgatgatgcaatctccccgcggctagacggaaagaccccatgaacctttactgtagctttgcattggactttgaaccgatctgtgtaggataggtgggaggctttgaagcgtggacgctagttcacgtggagccgtccttgaaataccaccctggtttgtttgaggttctaaccttgacccgtgaatccgggtcggggacagtgcatggtaggcagtttgactggggcggtctcctcccaaagtgtaacggaggagttcgaaggtacgcttggtacggtcggacatcgtacctaaagtgcaatggcaaaagcgtgcttaactgcgagaccgacaagtcgagcaggtgcgaaagcaggacatagtgatccggtggttctgaatggaagggccatcgctcaacggataaaaggtactctggggataacaggctgataccgcccaagagttcatatcgacggcggtgtttggcacctcgatgtcggctcatctcatcctggggctgtagccggtcccaagggtatggctgttcgccatttaaagaggtacgtgagctgggtttaaaacgtcgtgagacagtttggtccctatctgccgtgggcgttggaatcttgacgggggctgctcctagtacgagaggaccggagtggacgtaccgctggtgtacctgttgtctcgccagaggcatcgcagggtagctatgtacggaagagataaccgctgaaagcatctaagcgggaaactcgcctgaagatgaggattccctggcggcttgaccgccttgaagggtcgttcgagaccaggacgttgataggctgggtgtggaagcgcagtaatgcgttaagctaaccagtactaattgcccgtaaggcttgatcctataaccagtgtgttttgcctggtgagtcgatcgccttgtgccagatacgcacaaccccaactacatccctattcgcagcgttgacctcaacctcagcgctgcaacccctcatgcctggtgaccatagcgagctggaaccaccccttcccatcccgaacaggtccgtgaaacagctccgcgccgatgatagtgcggattcccgtgtgaaagtaggtcatcgccaggctcttattccgcagaacccccagccccaaaaggctgggggtttttgctttggcgcggcggaaacgcccgggggtcggcgcaggcacgcatgtcctcgttgttttcatgccgcatcgcgggtcgccgagcattccgggactgtccgccttctgctatggtcgacacccaagtgccacatgcggcacgaaggcggttgcaacgcgtgtttgcagcaagtagtgagcaatagccggacccttgccaacagagcaggtccggattcgggtttcgaggggttacatgacggccaaggtgtttcggctggttttgactggcgccgccggcgcgctgctgctggcaggatgcgcatctactccccctgtttccgcggttcctccgggtgaaacggccgctgtggccggcacttccgcgatcgattgccaggcattcgccaggcgcatggccgcgtacgcggcagcgcagacggatccggcggtgactgccatgtcgtcgcccgacccgctggctgccgccaacaccagtgcggcggaagccgaggcgggtgatgacggcgaagtcgccgatgccgcgccgccgaccctggtcacgctgccgttgttctcggtgtcaccgcatcgcgaccagttgccggtcggctggcagccttggaccatcaaccgcaacaagacgcccacccgttattcgatggcagaggtcgaccagcgcgtggtcgtccatgcgaaggccgagagttcggcctccggcctgtatgtcccgctgcgcgatcgcgatgccggcatgctgcgctggacctggaagaccagcggcattatccgcaacgccgacaacagccacgccccgcgcgaggattcgccgttgcgcctgttcgtcgccttcgatggcgacaagggtgcgctgcccttgaaagaccagctgatgtacgagatggcgcggctgaccaccggccgcgaaatgccctacgccacgctgatgtacatctggggcggacggcgcgcggaaggctcattggtgaagaacccgcacaccgaccgggtacgcatgatcgtggtggatagcggcatgaagcacgccaatgagtggcgttgccatgagcgcgacctgcgcgccgactaccgcaaggccttcgggaccgaccccggcccggtcatcgccgtgggcatcatgaccgataccgacaacaccaagagcaaggccgagtcctggtacggcgacatcgcgctggactgaagcgccccggcggcgccttcagccgccgataggctcggccagcgcgagcaccgcgaacgaggccagccagtgcgtggacacatactcgccctcgaccgcctgcggcagcgatgcctcgagatgatcggaccatgcccggatggccagcggccgcagcggctcgggcagggcgggctccagcatgcgccagcaccaggcgcgcgaaaggttgagcccgtccaggtgcgaggtcttggggtcgctgcgattggtcacttcgaccggcgtcagccaattagccagttccgcctgccccggcacgaacaactcccaccattctgaaaacgcgcagccgtccatcacggcgtgcatcagcacggcttcggtcagcccgccggacaggaattcatcgccgccgggctcatatcgcgccgggtatttctgatcatgtccgaaccagcggtgggcgcgccgcacgatggcgcgccgcaaggtgaagtcctggtgtgtgcgcgcataggccatggccatgaccagggcgaaggcgctgttgtaatgggtgccggtgcgcaccgggaataccgctgcatccaggaaatccgccagttgccgtgacaggtgcgatgccagcggcgcgcatgcctcggcccaggtggctgcctgggcgtcctgccgcgccagcgccagcaactccgcctgcagtttcagcatccagccccagccataggggcgttcgaaggtgcgcgaaaggggctgctggaagtaggccagttcgaccgcaatgtgctctggacgcagctgggcgtccagcgttgcgcggatgcggggcgcctcctcctggtccggcgacagcgctagcagccgcaccagcaaccagtgcatgtgcacgctggagtgccagtcgtagctgccgcaaaagaccggatgcctggccgacggttcggccaggtcaccggcgctggccatcatgtggtccagcttgtacggatagcggcgcaggatattgtccagcgccacgcgcgcgaagctgcgcgctgtctcgcgatccagcgccaggcggcccatcgcggatgctccccagttttttatcgttgtgctgtgctcaggtgcgtaacgtcacgcaggcgccagccacttttccaccagccgcacgaagaacgtcgagcccaccggcagcagttcgtcgttgaaatcgtagctcgggttgtgcagcatgcagggcccgatgccatggccggcgtcgcgatggccgccgtcgccgttgcccaggaacaggtagcagcccggcttgtgctgcagcatgaacgagaaatcctcggcgcccatggtgggctcgacattgctgtcgacgttgtccgcaccgaccagttccgcggcgaccgcggccgcaaagccggtctcggcctcgctgttgatggtcggcggatagttgcggtggaattcgtattcgatggtgcagtcgaatgccgccgccaccgcgcgcgccacttcttccatgcgccgttcgatcaggtccagcaccggcaccgtgaacgtgcgcaccgtgccgccgatccaggcctggtccggcacgatattggtggcgtcgcctgcgtggaactgcgtgaccgagatcaccgcggtatcgatcgggcgcttgttgcgcgtgatgatgccctgcagcgccgacacgatctgcgcagcggtgaagaccgggtcgttgccgttgttgggcatggccgcatgcgcacccttgccgcgcaccacaatgcggaattcgttgctcgatgccatcagcgggcccgcgcgcgtgccgaacgctccgaccggcatgcccggccagttgtgcacgccgaacaccgcgtcgcacggaaagcgctcgaacagcccgtccttgatcatttcgcgggcgccgccgccgccttcctcggccggctggaagaccaggtgcacggtgccgtcgaagggcttgtgctgcgccaggtagcgcgccgcaccgagcagcatggcggtgtggccgtcgtggccgcaggcgtgcatcttgccggtgtgctgcgagcggtgatcaaaagtgttcgcttcctgcagcggcagcgcgtccatgtcggcgcgcaggccgatggtgcgcgggctgttgccgttgcggatcacgcccaccaggccggtggtgcccaggccgcgatgcacttcgatgccccacgattccaggttctgcgcgaccacgtcggcagtgcgctgttcttcgaagcagagttccgggtgggcgtggatgtcgcgccggatcgcgcggatttcggcttgtgcctgcaggatttcggggatgagcttcatgatgcctggctgccctggacgttaggggcgttagcgttggataccccgatcatacgatgcctctccgcaaagcgccaaaatgcggcgatttcctgcgcgcttgccaggttggcgcagtgcaatatgccagcgcgggtgggtttccccgcattgccgcgacatgcgcactgctggaacagttcatgcttgaagtgcccggccggcaatttcgtcgctttgtgatgcgcaaccgcaccccaaaccgcaccaaaacgcagcgccgccgcgtgacccgcggcgcggcgcattgccgatcctaaaacgtctgcttcacttcctacagggagaattgcgcgatgtcccttcgcactttcaagaaggcaattggtgtggtggcggtagccggggcccttggcctggcgctcgccggcaccgcccaggccgcggacctcaaactggccatgagttcgccgccaacctcgatggatccgcacttctacaacctgttctccaacatcaacgtctccgagcatatcttcgactcgctgaccaagatggatccggacagccgcatcatcccgggcctggccgagtcgtggaagctggtcaacaacctcacctgggaattcaagatccgcaagggcgtgaagttccacgacggctccgaactgaccgccgaagacgtaatctggtcgctggaccgtccggccaccatccagaacagcccgggcaagttcgatgtctacaccaaggcgatcgtcaacaagaagatcatcgacaagcacaccatccagctgaccaccaaccagccctatccgctgatgctgaacgacctcacgtcgatcttcatcgtgcagaagaaggcgacgcaggggctgagctcggatgacttcgcgcagggcaagggcatggtcggcaccgggccgttcaagttcgtcagctatgcccgcgacgaccgggtcgagctggtgcgcaataacgactactggggcgccaagccggcctgggacaaggttaccctgcgcttcatccccaatccggcgacgcgcctggcggcgctgctgtcgggcgacgtgcaggccatcgagaacgtgcccacgcctgacctgcccaaggtgcgccaggatcccaagctgtcgttcttctccaagatctcgcaccgcgtgatctacctgtatttcgatgccaagcgcgacaagtcgccctacgtcaccaccaaggaaggcgcaccgctggacaagaacccgctgaaggacgcgcgcgtgcgcaatgccatcagcatggcgatcaaccggcagggcatcaaggaccgcctgatggaaggcctgtccgagccgaccaacaacctggtgccgccgacgctgttcggctataaccccaacctgaagacggtcaagtacgaccccgaggccgccaagaagctgctggccgacgccggcttcccgaacggcttcggcgtgacgctgcatacgcccaacaaccgctacgtcaacgacgagaagatcgcgcagacgattgcgcagaacctgacccgcatcggcatcgccaccaaggtcgaaggcatgccgatggcgacatactcgtccaagggcatcaagcacgagtggtcgttcgggctgctgggctggggcgcgcagaccggtgaggtcagctcgccgctgcgcgcgctgctggcgtgcgaggacagcaagaagggcttcggcaccaccaactggggcgagtactgcaaccccaagatggacgtggtgctggagaaggcgctgtccaccgtggatgacaacgagcgctccaagctgctgcaggaggccaccgcaatcgcgatcaacgatggcggtatcgtcccgatccaccagcaggtgaccacctgggccacacaaaagggcatcgtctacgtgccgcgtaccgacgagcgcacctacgcgcataacttcaagccccagtaagctccggtcaacccagacaggagcctcggcccgcggatggtctgctggccgagtttgcggtgccgcgcatggctgccgcgccacacccgggaagcgccgcgcggcccgggtgtggcgtgcattcgcgcgcgaaaggaaagtggttcgaacatgctggtctttatcatccggcgcctgatgcagagcgtggttgtgctcttcgtcatgtcgctgctggttttcctcggcgtctttgccatcggcaatcccgtcgacatcctgatcaacccgcaggccgaccaggaggacatcaagcgcaccatcgcggcgctgggcctggacaagccgctgtgggagcagtactgggtgttcctgcagaatgcgctgcaaggcaacctgggcacctcgttcgcgcacggcacgccggcactcaagctgatcttcgagcgcatgcccgccaccatggagctggccatttgcgcgatcctgctggcgatcgtgctgggcattccgctgggcctgtgggccgggctgcggcccaagggcattgccggcaagtcgatcatggcggtgtcgatcctgggcttctcgctgcccaccttctgggtcgggctgatgctgatcatggtgttcgcggtgcagctcggctggctgccctccaacgggcgcggcgagaccgtgcgcgtgctcggcatcccgctcagcttcctgactgccgacggcatccgccacctggtcctgccggcggtgacgctgtcgctcctgaatatcgccatggtgatccggctcacgcgcgccggcacgcaggaggcgatgatgcaggactacgtcaagttcgcgcgcgccaagggcctgtcgaacacgcgcattgtcggcgtgcatgtgctgaagaacatcctgatcccgatcgtcacggtgatcgcgctgcagttcggctcgatcatcgcatttgcgatcgtgaccgagaccatcttcgcctggcccggcatgggcaagctcatcatcgactcgatccagctgctggaccggccggtgatcgtcgcctacctgatggtgatcgtgacgctgttcatcctgatcaacctggtggtggacatcatctacagcatgctcgatccgcgcgtgcgcattgccgacaacaagggctgagccatgagtgccgtatctgtagaacaagaggacaagaccccgccgctcgccgcggcgcgcgaacaatcgccgtggcggcgctttgccgcggagttcttctccagcaagattgctgtggccggactggccacgctggtcgtcatcatcctgatcgccatcttcgcgccgtggctggcgccgcagaacccctatgacctggccacgctggacgtgctcgacgcgcgcctggcgccgggcgagcaggccggcaccggcatgaccttcctgctgggttcggacgagcagggccgcgacatcctgtcggcggtgatgtacggcctgcgcatcagcatcggcgtgggcgtggtcagcaccgtgatcgcgctgctgctgggcgccacgctcggcctgctggccggcttcctgggcggtcgcaccgaggccttcatcatgcgcgtggccgacctgcagctgtcgttcccgccgatcctgctggcgctgatcctgctagccttcctgcgcccgggcctgggcaatatcgtgatcgcgctggtggcggtacagtgggcctactacgcccgcaccacgcgcagcgccgcactggtggagcgccgcaaggaatatatcgaggccgccacctgcctgggcctgccgccgatgcgcatcatgttccgccacctgctgcccaactgcctgccgccgctgatcgtgatcgcggcgctgcaggtggcctcggcgatcacgctggaagcgacgctgtccttcctcgggctgggcgtgccggtcacggagccctcgctgggctcgctgatctccaacggccagcagtacatgctgtcgggcaagtactggatcagcttcttcccgggcattgcgctggtggtcaccatcgtggcgatgaacctggtggccgaccagttgcgcgacgtcctcaacccgcgcctgcagacgcaataaccaggagcggtacatggcacaaccgacattggtggttgaacacctgaagacgcaattccacacgcgcggcggcatcgccaaggccgtcgacgacgtgtccttcaccgtgggccgcggcgagatcatggggctggtgggcgagtccggctcgggcaagtccatgaccgggtattcgatcatgggcctgatcgatccgcccgggaagatcgtcgacggccgcatcgcgctgaccagccgcgacggcatcacccgcgacctgcgcgcgctcacgccggcgcagcagcgcgacgtgcgcggcaaccgcatcgcgatgatcttccaggacccgatgatgacgctgaacccggtcctgcgcatcgacacgcagatgatcgaggcggtgctggcccatgagaaggtaggcaaggcggtggcgcgcgaacgcgcgcgcaatgcgctggcgcgggtcggcatcccgtcgccggacgagcgcctgcaggcctatccgcaccagttctcgggcggcatgcgccagcgcgtggcgatcgcgatcgcgctgctgaacaagcccgacctgatcattgccgacgagcccaccaccgcgctggacgtcaccatccagggccagatcctgtacgagatgcagaccctgtgccgcgaatcgggcacggcgttgatctggatcacgcacgacctgtcggtggtggcgggactggccgataccgtgtgcgtgatgtacgccggcaagatcgtcgaggccggcgacgtgcgccaggtgctggagcaccccgagcacccctacacccacgggctgatcagctcggcgccgtcgcgcaatccgcgcggcacgccgctgcggcagatcccgggcatgacgccgtcgctgctgaacctgccgggcggctgcgcgttccgcgaacgctgtccctacgccaccgctgcctgcaagaccgagccgccgctggagactgccgccgacggccgccgcctgcgctgcttccatccggtgctggccaaccaggaggcagcatgagcgcaactgaactgcaatcccgaccgatgacgaatcctgcagcggaagaggggggcacgccgagcgcgccgatcctggagctgcgcggcgtgtccaagcgcttcgtcaagtcgctcgacaccgccgcgcgcatcgccaacctgttcggcgcccatgcgcatgacgaggtggtgcacgcggtcgaccgtgtcgacctgagcatccgcgccggcgaagtggtgggcctggtcggcgagtccggctgcggcaagtccacgctcgggcgcatggccgtgggcctgcactcgctgaccgagggcgagcgcctgtggcgcggcatcaacctggaccacctgccacccgacaagcgccgcgagaagcagctggcgatccagatgatcttccaggacccgtacgcctcgctcaatccgcggctgcgcgtgctggatatcgtgggcgaggcgccggtggtgcacggcatggtcgagcgcggcgcgcagaagggctatgtggaagacatgctggtgcgcgtgggcatggacccgaccgtgctgcggcgctttccgcaccagttctccggcgggcagcgcgcgcgcatcggcattgcccgggcgctggcggtcaagcccgagttcctggtgtgcgacgagtcggtggcggcgctggacgtgtcgatccaggcccaggtgctgaacctgttcatgcgcctgcgtgaagacctgaacctgacctacctgttcatcagccatgacctgggcgtggtcaagcacatcagcgaccgcgtggtgatcatgtacctggggcgggtggtggaatccgcgccgaccgaagacgtgttcgccgcgcccaaccatccctatacccaggccctgctggccgaagcgcccaagctggaggtggcccgcaagacctatgtggcgatccgcggcgagatcccgtcgccgctgaacccgccgccgggctgccacttccacccgcgctgcccgcatgcgatgccgcgttgccgggaagagcagccgctgctgaaggagattgcgccgatgcggttctcggcgtgtcacctgaacgacatggagtagggcctggttttctcctccctgcgcgagggaggagaaaaccttgaatctcagcggatcacctgccccttcgaattgatgatcgtcatctccacaaacttcgaacccacgtggttctccggcgtgaagttgatgataaacccgccgaggtcatagctgcgcattgactccagcgcggtcaccagcttctcgcgcgtcaggtccttgcccgcgcggcgcaggccctcggtgaacgtcttggcggagataaagccttcgatgctggcgtagtcgaattcgctgggcttgccggcggcctgcagcaggcgcaggtactcccgcacgatcggcagcgtggcgttgcccgggtgcggcatcacctgcgagatgatcacgccgctgccctgcgcgccgacctcgttggccagcgcctgcgtgccgacgaaggagacgttgtagaactggccgttgtagccgcggcgcagcgcttccttcacgaaggcgccggcggtgcggtaggcgctgatcatcaccacggcgtcgggcctggcctttatcgaaccctggatggcgtcgccgatttccgtggtgttgcggaccacgggctcgcgcgcgacgatctgcacgccgctgtcgggcgcggccttgagcgcgcgctccaggccatccagcccggccttgccgtaggcgtcctcgttgtagaccacggccacgcgcttgagcccggtggtctggatctggcgcaggatggccgcggtttcctcgttgtagccggcgcgcacatggaagacgtagcggctgcgcggctcgcgcagcgactgcgccccggtgtacgggccgaagaacggcacccgggcctggattgccagcggcagcgcggcctggctggtgggcgtgccgacatagccgaagagggcgaagacgcggtcttcctcgatcagcttcctggtgttcctggcggcgggctcgggctcgtagtagtcgtccagcgcctccagccggatcttgcggccgtggatgccgccctgctggttgatatggtcgaaatacagccgtgcgcccgagttcatctgcttgccgagcacggcggtcgggccggtcagcgcggcggactggcccagcaggatggtgtcggcggtgacgccgttttcggatgtggcgggggtgcccgccgtgttggctgcgaaggcagcgcaggatgcgccacccgtgccgatggcgcacgccaccagcaggccggcaagccggccattgaccccggatcggaacgacataaaccccccgcgaaatgtggttcggttacccgtttgccgcgtcggccggtctcttgccggcgaattgctcacgtcgtgcggcatggtgcgcgtaccggtctgtgccggcagcgcgccggcacatcataatcgaatacaatcggatcgagatactccccgccatccccccgcacggccgggaaagcgccgcccgccggcgcggctcgggcgccgctaccagcgcgcctgcgccggcatctccagttccgtacgaccgaacgaaaaaacaacacaccccgcccggagaccccatggcttcccgcatcgtccgcgccgcctgcccgcatgactgccccgacacttgtgccttgctcgtcaccgtcgaggacggccgtgccgtcaaggtagcgggcgatcccgaccatcccggcacgcagggcgtgctgtgcaccaaggtgtcgcgctacaccgagcgcacctaccacccggaccggctgctgacaccgatgaagcgcatcggcaggaagggcgaaggcaagttcgcgccgatctcctgggacgaggcgctcgacaccatcgccacccgcctgcaggcgatcgcggcgcgcgatccgcaggcgatcgtgccgtacagctacgccggcaccatggggctggtgcagggcgagagcatggccgcgcgcttcttcaacaagctgggcgcgtcgcggctggaccgcaccatctgcgccagcgccggcgccaccgcgctgcgctacacctatggcgccagcgtgggcatggacatggagcacgtggtcgatgccaggctggtgatcatctggggcggcaacccgattgcctccaacctgcatttctggacccgcgcgcaggaagccaagcggcgcggcgccacgctggtggcaatcgacccgtaccgctcgctgagcgccgagaagtgccaccgccatatcgcgccgatgcccggcaccgacggcgcgctggcgctggcgctgatccatgtgctgatccgcgacgacctgctcgaccacgactacatcgaacgccacaccgtcggcttcgaggcgctgcgcgagcgcgcgcaggcctacaccccggcacgcgcggccgagatctgcggcatcccggccgaggacatcgaatggctggccggcctctacggccagctggcggtgcgcgagcgccagccggtggcaatccgcctgaactacggcatgcagcgtgtgcacggcggcggccaggcggtgcgcgcggtggcgtgcctgccgtcgctggtgggcgcctggcgccagcccgcgggcgggctgcagctgtcgacctctggcttcttcccgatcaacgaagccgcgctgcagcgccccgacctgctgcctggctggccgcagacgctgccgcgcatcgtcaacatgagcaccatcggcgacgcgctgctggccgagcccgcgcccggcgcgccgcgcatcgaggccgtggtggtgtacaacagcaacccggtcgcggtggcgccggaatccggcaaggtcgccgcgggcttcgcgcgcgaggacctgttcacggtggtgctggagcacttccgcaccgacaccgccgactatgccgacatcctgctgccggcgaccacgcagcttgagcacaccgacgtgcacaaggcctacggccacacctatttactggccaacaacgccgccatcgcgccgatgggcgaggccctgcccaatactgagatcttccgccggctggcccagcgcctgggcttcaccgaggcgtgctttgccgacagcgacgaggccatcgccgcgcaggccatcattccgggcgatgcgcgcgcggccggcatcagctgggaatcattgaaggagcagggctggcagaagctggcgctgccggcggcgccgttcgccgagggtggcttcccgaccgcatcgggcaagtgccagttctattctgagccgatggcgcgcgacggcctcgacccgctgcctgactacgtgccgcagtacgaggcgccgctgaccgcgcccgaactggcggcgcgctatccgctggcgatgatctcgccgccggcgcgcaacttcctcaacagctccttcgtcaacgtcgacagcctgcgcgccaccgagggcgagccgcacctggacatccacccggccgacgccgctgagcgcggcatcgtgcacggcgccatggtgcgcgtcttcaacgaccgcggcagcatggtggcgcgcgcccgcgtcaccgaccgcgcccggcgcgggctggtggtgggcctgtcgatctggtggaagaagctggcctcggacggcaagaacgccaacgagctgaccagccagcgcctgaccgacctgggccgcgcgccggtgttctatgactgcctggtgcaggtcgaggcctgcacggaaggggcagtcctgccggcatgacgccgcagcgtggccgctggcgctgggcggcactcctggcggcgaccggcctcaccgcggtggtcctggtgacggccgggtgcgaggccgtcggctactacgcgcagtcgatcggcggccatctgggcgtgatggcccaggcacagccgctgaccgacgccatcgccaacgcgcgcgacgccaacgatgggcgcctggcgcagcggctggcgctggccggccgcatgcgtgacttcgcctcgcgcgaactgaagctgcccgagaacggcagctaccgccgctacgccaacctgcaccggccctatgtggtgtggagcgtgttcgccacgcccgagctgtcgatggacctgcgcaagtggtgcttccccatcgtcggctgcatcagctaccgcggctactacgcccagtccgatgccgagcagtatgcgcggggcctgcgccgcgacgggctcgagacctacgttgccggcatccccgcctattcgacgctgggctatttcgacgacccgctgctcaataccttcgtctacctgcccgagggcgaactggcgcggctgatcttccacgagctcgcgcaccaggtggtgtacgtgcgcaacgacaccgccttcaacgagtcctttgccaccgcggtggaagccgcgggcgtggagcgctggctggccgaggatgcgtcggaggacgcgcgcgccagctatcggcagtacgatgcccggcgccagcagttccgcgcgctgttgctgggcacgcgcgaccggctggtggcgctgtaccagaccccgctcgatgacggcgccaagcgcgagagcaaggcaaagatctttgccgacctgcgcgcccagtacgcgcggctgcgcacggagtggggcggattcagcggttatgaccgctggttcgaccagccgctgaccaacgcccacctggccgcggtggccacttaccagcagtgggtgccggccttcaccgcgttgctggcgcagtgcaacggcgactggcagcgcttctatgacgaggctgcccgtatcggcgcgctgcccgccgccgagcgcgaggccgcgctgcagcggctggcgccgccggccacgcgcaccggcacgctgaccgcgggcggaaagaccgcggccaactaagctgccgcgtcgcttaccaggtatcgatgaaccgtctcggtgcgttggcctggcggccgaggctccccggcggcaccgaggccagcccgcgcagcagccagcgccgcgtgtcggcagggtcgatcaccgcgtcgatctccaggtggctggccatgttgagcgcgcggccgcgctggtaggctccgtcgaccatgcgcgcgaacagcgccgcgcgctcgtcggggtcggccacggcctccagttccttgcggaagcccagccggatcgagccctcgatgcccatcgcgccgaactcgccgctgggccaggccgcggtgaagaagggcgcggcaaagctgccgccggccatggcctgcgcgcccagtccgtagcccttgcgcagcaccaccgtgaagaacggcacgcgcagcgcgccagcggtgacaaagaggcgcgacacgtgccgcaccgtggcggtcttctcggcctgcggcccgaccatgaagcccggggtgtcgcacagcgacaccatcggcagcccgtgcgcgtcgcacagctgcatgaagcgcgcggccttgtcggcggcggcgctgtcgatggcgcccccgaggtggcgcgggttgttggcgatgcagccgaaggcgcggccttcgatgcggatcagcgcggtgatgatgccggtgccgaacgccgcgcgcagctccagcaccgagccgctgtccgccatggcggcgatcaccgcgcgcatgtcgtagctgcgcaggcggttctcggggatggcgtggcgcaggtggcgcgggtcttccgcctgccagtcatgcacgtcgccctggaagtaggacaggtagcgttgcgcggcatcgaccgcggccgcttcgtcatcgaccagcacgtcgatcacgccgttgggcccctgcacgctgaccgggcccacttcctcgggcgcgaacacgcccagcccgccgccttcgatcatggccggcccgcccatgccgatggtggcgctgcgcgtggcgatgatgacgtcggcgcagcccagcagcgcggcgttgccggcaaagcagcggcccgacacgatgcccaccagcggcacctggcccgacagccgcgcgaactggatgaacgaggtgcagtccagcccggccaccaccggcatgtcggtatcgccgggccgcccgccgccgccctcggcaaacagcaccaccggcacctgccactggcgcgccagcgccagcatgcggtccagcttcttgtggccgtagaagccctgcgtgccggccagcacggtgtagtcataggccagcaccatgcagcgcgtatcggcaccgggaaagcgcgccgcgttgacggacccgataccggtgacgatgccgtcggcgggcgtggcgctgaccaggtcttcgacactgcggcgctgccgttgcgcggcgatggcgagcgcgccgtactcgatgaaggagccgtcgtcgcacagccgggcgatgttctcgcgcgccgtttggccgccctgggcgtggcgcctggcgacggcctgggcgcgtgcggcgtcgtggccgagggcgtggcgctccagcgtctcgcgcaggtccgcgcgcacatggtcgaggtcggccgccgcggcggtctcggcggcatggccggcatcgccgccgggcgccagcacgatcaccgcggcgccggcgcgcagcgtggcacccgcgacggccagcacgcgcagcacggtgccggcggcgggcgcctccagcggatgctccatcttcatcgcttcgatgatggccagcggctggccgcgcctgaccgtatcgccttcgcgcacgtggatggcggcgagcgcgccgtccatgggcgccggcacggcaatggcgtcgtcagggacatcggccagcgcattgtgctcatcggccggggcgctgtcggccaggccgggcggcgcgtgcagcaccgggtggtcggcgtcggcggcggcaagcgcggtcagcgcctggtccaggtactgcgtgtgcacggcattgcggcgtatgtcgtccagctgcagcagatcctgcagcaagcggcggttggtgtcgatgccttcgatgcggaactcgcacagcgcgcggtaggcgatcgcgagcgcacgcgcaaagttgccgccgggttcgtgcacgatcagcttggccagcagcgaatcaaagcgcggattcgccgtcatgccggcaaagcccgcgctgtccacgcgcacgcctggcccgttgggcggctcgaacgccgtcagcgtgccgctggccgggcgcagctggccctgcgcgtcgaggtgctcggcattgatgcgcaactgcaccgcgatgccgcgcggcgcgggtgcctgctccaggcccaggtcggccaggcgcgcgccggcggcgatggccagctgggtttgcacgaggtcgacgccggtcaccatctcggtcaccgtgtgctcgacctgcaggcgcgggttggcctccatgaaccagaacgatgggccgccattgccgctgtcttccaccaggaattcgaacgtgccgatgccgcgataggcggcggcgcgcgccagtgtggcggcggcatcggccagccttgcgcgcagtgcgtcatccaatgacgggctgggggcgatctccaccagcttctggtggcggcgctgcaggctgcattcgcgctcgcccagcgtcagcacgcggccctcggcgtcggcgaccacctggatctcgatatggcgcggcgcggcgacgatgcgctccacgtagaccgcaccattgccaaacgccgcggtagcttccgagacgcagcgtgcgtaggcctcgtcgatcccggcagcgcgatgcacggcgcgcatgccgcgcccgccgccgccggcgagcgccttgatcatcatgcccgcttgcccgtcgaggctggcgaagaaggcccgcgcctgctccggcgaggtcgggccggcggtgccgggcacgaccggcacgccatgctcgcgcgccagcgcgcgggcgcgggccttgtcgccgaacaggcgcagcacgtcgggcgcagggccggcgaagaccagcccggcgtccaggcaggcctgcgcaaagtcggcgttctcagacaggaagccgtagccagggtgcaccatgccgcagcccgcccgccgcgcagcgtccaccacggcggcaatgtctaggtaggcgcgcggaccagtgccgggcagcgccacggccgcgtcggccttgcgcacgtgcagcgcgtcgcagtcgtcttcgctgtacagcgccacgctggggatgcccatggccgcggcggcccgcgcgatccggatggcgatttcgccgcgattggcgatcaggagcttgtggttcgtcatgagcgggagcgttgatggcgtgtgttgtgggcgcagtgcgggtatgtactcgttggtacatttatttaccgctgggtaagattctggggtgatcgggtattggcgtcaattggccgttttccctttcccctttggcgccgcaggctgtggcgtcaagcaagggctcgaccggactggcgtagcgagcccgccatgcgagaattgcatcatgtcgattgcacccagatccgcaccgctgaacccgccgttgagcacaccgccagagccgcagccggcccgcccgcatatcgccgagcgccaggaggcccgccgccgccagattctcgataccgccgcgcagctcttctacagcaagggctatcccggcatgaccatgaacgacctgtgccgcgcgctgggcgtgaccaagccggcggtctactactactttactgacaagtacgagatcttcgacatcctgtgccgcgagtcggcccagacctgcctgcccgtgatccgcgagaccgcggaccccgcgctgccggtgcgcgagcgcctgcaggcctgcctgctcgagatggcgcggcgctgcgtcgcctgccatgtgccggccacgctgagctttcgcgacaaccagtacctgcgccccgacaccgtggcgtggctcgacagcatggcgcgggacttctatcgcgacctctatgcgctgctggaagagggcaagcgcgatggcgtgttcgccttcggcgacgcacgcgtgacggcccatgcgatcggcagcgtggtggggttcctctacacctggcatgaacccggccgcatggacccggagacgctggcgcaggagcttgccgccagcatgatgaaactggcgctgcccagcggcggctgagtgtggatttgcctcactaggggttatccccctacttgcgcccgatcggtggcgcataatgcccgtcaggggcaccaaggcctgtccggtggccccgaggacttcgtctaagttgttgttttaaccggggagcacgtttagcatctcggcaaaatcgaacgaccattcagaaatcaggagacggtgctatggaaagaatttggctgaaacactacccggccggcgttcccgccgagatcgatgccagccagttccgctcgcttgccgcgctgctcgaggcatctttccgcacctatgccgaccgcaaggccttcatctgcatggacaaggccatcacctacggcgaactggaccagctctcgacgcactttgccgcctggctgcagtcgcgcgggctgcgtcccggcgcacgcgtggcgatcatgatgccgaacgtgctgcagtacccggtggtgctggcggcggtgctgcgcgcgggcttcgtggtggtcaacgtcaacccgctctacaccccgcgcgagctcgagcaccagctcaaggacagcggcgccgaggccatcgtgatcctggagaactttgcctccacgctgcagcaggtgctggccaagaccccggtcaagcacgtggtggtggccagcatgggtgacatgctgggcgggctgaagggagcgatcgtcaatttcgtggtgcgcaacgtcaagaagatggtgccggcatgggagctgcccacctgcgtgcgcttcaacagcgtgctggccgaaggccgcaagctgacgctgcagccggccaccacggggccggatgacatcgccttcctgcagtacacgggcggcactaccggcatctccaagggtgcggtgctgctgcaccgtaacgtggtggccaacgtgctgcagtccgaggcgtggatgcagccggcgctgaacaagggcgcacacatcgaccagcccatcaccatcaccgcgctgccgctgtaccacatcttcgcgctgacggtctgctgcctgctgggcatgcgcagcggcggcaccagcgtgctgatcccgaatccgcgcgacatcccgggcttcatcaaggaactgcagaagtacaagttcaacatgttcccggccgtcaacacgctgtacaacgcactgatcaacaatccggaaatcagcaaggtcgatttctccggcctgcgcgtggccaacggcggcggcatggcggtgcaggaggcggtggccaagcagtggctggccaagaccggctgcccgatcatcgaaggctacggcctgtccgagacttcgccctcggccacctgcaacccgaccgacaccgacgcattctccggcaccatcggcatgccgctgccgtcgaccgaagtggtgatccgcgacgatgacggcaaggacgtgccgctcggccagccgggcgaaatctgcatccgcggcccgcaggtgatggccggctactggaaccgcccggacgagaccgccaaggtcatgaccccggacggcttcttcaagaccggcgacatcggcgtgatggacgagcgtggctacaccaagatcgtcgaccgcaagaaggacatgatcctggtgtcgggcttcaacgtgtatccgaacgaggtcgaaggcgtggtggccgagtgcccgggcgtgctggaagtggcggccgtgggcgtgcccgacacgcactcgggcgaggtcgtcaagctgttcgtggtgaagaaggatccggggctgaccgaggccgatgtgatcgagttctgcaaggagcgcctgaccggctacaagcggcccaagtacgtcgagttccgcaccgaactgcccaagaccaacgtcggcaagatcctgcgccgcgaactgcgcgacagccgcaaggccgcctgagcggcagccgctgccaacgacaacggcctcccgagtggaggccgttgtgctttcaggctgcgccgcggcggctcagcactcgttcgatggcgccaggcgggcttcctggctgccgtcggggtagatcacccgcacgcacgcgcctggctccagccccggcgccgccggcgcgttggccgccacgatcgtgccgtccatggttcgcaccttgtactggaacaggtccacctgctgcaccggcgcgggcttgttgaacagccggctcaggtcgaaggcaaagcccacgcccacgccgccacccccgccgccacccgcggcacccacgccgacgctggtgccgccgccgtagtacgggggcacctgggccacgtccaggcgggtcaggaacgtcttctcggtgacgcggccaagcttgatggtggcgttcaccggcgtgacctgcggcggctgcggcgtgctgctgcaggcagccagcaccggcagcaggccgcacaggacaagatagggccgggtcttcatggcgagatcaggccggtcttgagccggccaagcagtcggaacagggcgcgccggtcggtctcggccaggcccgagaacagttgcccgatccagtcctcatgcgcgcgcgccatgcgcgagaacgcggcgcgcccggccggggtcaggcggatcaggtaggcacggcggtcagtgggcagggcctcgcgtgagaccaggccttcctgctgcagctggtcggtgatgccggtgacgttgccgccggtcaccatcatgcggcgcgacagctcgcccatcttcaggccttccggatggcggtcgagctgtgccatcaggtcgaagcgcggcagcgtgcaggcaaaatcctggcgcagccgcgaacggatatcgccctcgatcagggtggtgcaggtcaacagccgcaaccacagccgcagggcttcgtgctcggtctggtcggcacgggtttcaaggtcgaccggcgcgctgtcggcgccggcggcaggggatgggtttggcatcttcagtgcatcggtgcgcaggtgtgcggccgcggccgccaggggccgcccacggggcgggcagccgacatttgatgcctcaagtatatgcgcgatacgcgccgccgccctgccggcgatcaaatcggcgtcaatccaccttggcgccggaatccttgaccaccttggcccacttggcggtctcggcgcggatgaacgcggcgaactgctccggcgtgttgccgacaggctcggcgccctgcgcctgcaggcgttcgcgcacggccggggcgttcagcgccttggccacttcctgctggatgcggtggatgacgtccggcggcgtgccggccggcgccagcatgccgaaccaggagctggcttcatactgaggcaggcccgcagcctgggcaatggttggcacgcccggcagcgccggcgagggcctggcgctggtcaccgccagcgccttgagcttgccgctcttgatcagcgccatcgacgacggcaggttgtcgaacatcacctgcatggtgcccccggccaggtccgtcagcgccggcccgctgcccttgtacgggaagtggaccatgaaggtccgggtctgcgtcttgaacaactccccggccaggtggatcgaggtgccgttgccactggaggccatgttgatcttgccgggattggcgcgcgcgtaagtgatcaggtccttgacgctgtcgatcttgttctgctgcgcaaacaccgggttcagcaccagcacgttgggcacggccgccacctcggtgatcggggcgaagtccttgatcggatcgaacggcagcttgccgtacagcgactggttgatgccatgggtgcccacggtgcccatcagcagcgtgtagccgtccggagcggccttggcgacgatgtccgcgccgatattgccgccggcaccgggtttgttgtcgaccaccacgttccagcccggcagcctggccagctctgcggccacggcgcgggccaggatgtcggtggtgccgccggcggcaaagggcaccaccagccggatcggcttggccgggtacgggtctgcggccagcgccgactggctggcgagcgcggcaaggctggcggacagcagcagcgcaacgacgcgccggcgagtgggttgcatgggtggtctcctggtgtggcccgctctcggtacctggggggctatggtcagtgcattctagtcggcgcccgcagtggcgccgatgaggtgatgccctatggggctgcagcgccgcgccaatgaaaaaaggcacccgaaggtgcctttcaagctcagccttgcgactggcgatcagaacttgtggcggatgccgatggcggcgccaatcatcttgtcttcgccggtacccaggaagtaaccattggcgaagctgatcgccgaggtgtcgaagttcaggccggcgttcttcgagaaggccgtggtcaggtacacgtcggtgcgcttggacaggttgtagtcggccacgaacgaaatctgccaggggttcttgatgttgttggtggtgttgacggtggcggcggccgggttgaagttcttgacgtcgtcgtagtagtacgcgagcgtcaggcccagtgccggcgtgacctggtagttggcgccgacccagtagtagttgtccttcaggatcgtattgtcgttcacatgcttgctcatgccccagcgatagccagccatcagcttggccggaccgaaggcatagctggcagcgaccgcggctttcttgaattcgccggtgccgccggcggcgttcagggtcgggttgtactggtcataggcgccgctgatgccgaacgggccggctgaccacgacacgccggcaccgtagccggtgtcgcggcggaactggccggcgacttcgccaccgccggcaacgccgttaccgaacgaccagtgcgcgaccgcggtcaccgggccgaacttgccggtgtacttggcggtgttgtccgaacggaagttcaggcccagttgagcgaccaccggctcgtactgggtggcatagccggtcggcgaaaaattggccatcatgtcaaacagcgaggtgtactggcgaccgaaggtcacgcggcccacctgggcgctttccaggccgacataagcctgacgaccgaacaggcggccgccttgctgcgagcgcccgtcgtccaggccgaaaccgctttccatcacgaacagtgccttcaggccgctgcccaggtcttccacgccacgcaggccccaacgcgaaccggacaggccgccggacgacatgcggaagaggttctccgacgggccggtcgcaaatccgttggccgccgacggcgtgacgctcgacatattgctcacgtactcgatgttggcatccaccacaccgtagagcgtgacgctcgattgggcctgcgccgccccagcaaatgcgccaagcgctgccagcgccagaagcgatttcttcatgctcgttgatctccactgtaagaattattggtgacggcccgggagaacctcctgttggtctccatcccccgtgcgtcaaacttcctgggaagttgcgaagtactgtaacaaacaacccttaattcactactcaggccaatcccccttgtcttcttttaacaactcagggtttctgagtagccgggcgcatcaatgcaaggcgggatgcgggttggcgccgattagaggcaagctacaatgcgggtaatcccgatggccccctgtgcgtaccgcagccgcagctgcgcaccccacgatcgcagggactgccgggaacgaagaccaactgcctctgcgacatggacaccctgatcaaagaattcgacgtggcattgcgcgccattgccggcgccacgcgcaccgcgcgcgccaacccggctgaccggctggcgccggacaccgaacagatgagcgccgatgaacgccgccacgtggccgggctgatgcgcatcaaccatgtcggcgaggtctgcgcgcaggccctgtaccaggcccagaagctcaccgcgcgcgacggcgcggtgcgcgcgcagatggatgccgccgcgcgcgaagaggaagaccacctggcctggtgcgccgagcgcctgcgcgagctgggctcgcgcccgagcctgctcaacccgctgtggtacgccggcgccttcgccatcggctggatggccggccgcgccggcgaccgcgtcagcctgggcttcgtcgccgagaccgagcgccaggtcgagcaccacctgggcgggcacctggaccgcctgcccgaggccgacggccgctcgcgcgccatcctcgagcagatgcgcgacgacgagatccgccacggcaacgccgcgcgcgatgccggcgggatcccgttacctgccccggtgcgggcgctgatgcgcggcgcctcgcgcgtgatgaccaccgccgcctaccggatctgagccggccctgcctgcccccccgccggccctgattccggcggggctggcgggcaattgttgtatcctttcttcgcgcgacggggcaggtctttcccgtgccgccggcagttcctccgcaagtggttctcaggtggtttctcggctttcctccctaagatcttcatttcattaaggattcactttttcggtgcgtgaggtgtgcgcgctaagtcattgttcttattcaaaaaaactcgtttgctgccctgcaaccagccttgacccgccatatcgcttcctctaaagtgggaaatagtgtgaggaagtgtatttttgtgtgaaattgggccccgaccgtgggatgatgtcgccatagtcggaacagaagggattcacgcgcatgctggccgacaaccggccggcatggaccgggagcaagcttgtttcagggagcatcggcactctcgctggatgccaagggacggatgtccattccgtcccggcaccgcgaggcgctgcaacagcaggccgagggccgggtgacgctgaccaagcacccggatggctgcctgttgctgtttccccggcccgagtgggaaaccttccgcacgcgcattgcagcgctgccgatggatgcgcactggtggaagcgcatcttcctgggcaacgccgccgacgtggaaatggacggcgcgggccgggtgctgatcgccccggagttgcgcagtgccgccatgctcgacaaagaagtcatgctgctcggcatgggcagccatttcgaagtgtgggatgccgcgacctacgccgccaaggaacagcaggcgatggcgcagggcatgcccgaagcattgaagaatttctctttctgacgaggtcatgagtccaaccggaacgccggcaacccccgccctgcgccatcgcaccgtgctgctggacgaggccgtcgacgccttggtctggcggcccgacggggtctacgtcgacggcaccttcggcaggggagggcacagccgggcggtgctggcccggctggggccagacggggccctggttgcgttcgacaaggacccagcagcaatcgcagaagcgggcaccatcaaggatgcccgcttctccattgagcacgcgagctttgcggccatggccgagcgcctgtcggggcgcggccacgtcgccggcgtgctgctcgacctggggatcagctcgccccagatcgacgaggcggcgagggggttttcctttcgtttcgagggcccgctggacatgcgcatggacaccacgcgcggcatcactgccgcgcagtggctggcgcaggcggatgagcaggacattgccagggtgatacgagactatggggaagaacggtttgctgtacagattgcaaaggcgattgttgctcgccggagcgaacccggcgatggcggacccatcgccactactgccgaccttgccgcgctcgtggcgaaagccgtcaaaacacgcgagaagggtcaggaccctgcgacccgcacctttcaggctctacggattcacgtcaatcaagagcttgaggacctcgaaagagggctgaaggcggcgtatgaactgctgcaggtcggagggcgcctggtggtgatcagcttccactcgctggaggaccgcatcgtcaagcggttcatggcggcgcacgcccgtccccagcaggatgccgacccggcgctgcggcgcgcgccgctgcgcgcggccgacctgccgcaaccgacgctgcgcctgctcggccgctacaagccgggccctgaagaggtggccgccaacccgcgcgcgcgctcggccgtgatgcgcgtggccgagaagctggcccctgccgcgaccactgccggcggaggcgcacgcgcatgaaccgcctgaccttcttcctgctggccgcgctgatcctgtgcgcgctgtcgctggtgagcgcgcagcaccaggcgcgcacgctgttcgtcgcgctggagcgggcccaggctgaagagaagcagctcgatatcgactggtcgcgcctgcagtaccagcagagcgcgctgggcaagagcgcgcgcatcgccgacgcggcgcgcgcgcagctgaagatggcgccggtcaaccccggcaagacccagtatctgtccggcatcgtgctgccgccgcctgccgaggcggcgtcggccagtgccgcggaggcgcgccgatgagcatggcccgtcccaacccgccccgccgtgaccgcaacggcaccgcctcgcgcccgcgcagcgggcagttctcggccagcccggtgctgggcctgcgcctgccgatgtggcgctccaagctggtggtgttcctgatgttcgccgccttcggcgcgctggccctgcgcgcggcctggatccagggccccggcaaccagttctacgaggccgagggcaagaagcgcttccagcgcacgctggagctgccggccacgcgcggcaagatcctggaccgcaacggcctggtgctggccaccagcctgccggtcaaggccgtctgggcggtgcccgaggacgtgcccaaccaggtcgaggccgccaagatccgccagctggcgaagttgctcggcatgtccgagaaagaccttggcaagaagctgtccgaggacaagggcttcgtctacctgaagcgccaggtgctgcctgacgtcgccgacaagatcgccgcgctgaagatcgagggcatccaccagacccgcgaatacaagcgcttctacccggaaggcgaggcgatggcccacatcgtcggcttcaccaacgtggaagaccgtggccaggaaggcgtggagctggcgcgcgagcccggcctggccggccgggccggcgcgcgccaggtgatcaaggaccgcctgggccgcgtggtcgaggacgtcggcgtgctgaagaccccgcgcgacggcgaggacatccagctgtcgatcgacgccaagatccagtacctggcctacaacgagctcaaggccgtggtcgaaaagcacaaggccaaggccgccagcgcggtggtgctcgacgcccagaccggcgaagtgctggcgctggccaactggcccacctacaaccccaacgaccgtacccggctgtccggcgagcagctgcgcaaccgtgtgctgaccgacaccttcgagcccggctcgatgatgaagccgatcacggtcggcctggcgctgcagctcaagcgcgtgacgccgtccacggtaatcaccactaccggcaagtacaacttcgaaggcgccaccatcagcgatacccacaactacggggcgctgacggtgagcggcgtgatccagaagtcgagcaacatcggcacgaccaagatcgcgatgatgatgaagccgcaggagatgtgggacatgtacaccagcatcgggctgggccaggcgcccaagatcggcttccccggcgccgtggccggccgcgtgcgcccgttcaagagctggcgcccgatcgagcaggccaccatgtcatacggctacggcctgtcggtgtcgctgttccagatggcgcatgcctacaccatcttcgcgcatgacggcgagctgatcccggtgtcgatgttccgcaccagcggccccgccaccggcgagcgcatcctgtcgccccaggtggcccgcgacgtgcgcgccatgatggaaaccgtgaccgcgcccggcggcaccgcgcccgaggcgcaggtgatgggctaccgcgtcggcggcaagaccggcaccgcctacaagcatgaaggccgcggctacaaccgcagcaagtaccgcgcctcgttcatcggcctggcgccgatgtcgaatccgcgcatcatcgtggccgtcagcgtggacgaacccaccgcgggcagccactacggcggcctggtggccggcccggcgttcgcggccatcaccggcggcacgctgcgcgcactgaatgtgcagcccgactcgccgatccgccagctggtggtcagcgacaaggtgcaggagagcgaaccgtggagttcgacccaatgacggccaagccactgctcccgctcgaggtcaccgcgcaggccagcaatgcgctggcctggctgcgtaccaacgtggccgccgccgcgcagctgaccggagatacccggcgcctggcgcgtggcgatgtgttcttcgcctacgtgctcggcaacgcgcgcctggccaccgacggccggctctatatcgcccaggcgattgccgccggcgcgggggccatcgtctatgaggccgacggcttcgactggcccttcagcgacgtcgtgccgcatctcgcggtgagccacctgcaccagctggccggcccgatcgccgccggctggcatggcaacccggtgcgcggcctggccgtgaccggcatcaccggcaccaacggcaagacctcgtgcagccagtggctggcacgggtgctgcaggccgccggcacgccctgcgcgaccatcggcacgctgggcactggcttcccgggcgcgctgcaggctaccggcttcaccacgcctgacgcggtgcagctgcaggccagcctggcgtccctgcacgacgccggcgcgcgcgcggtggcgatggaggtgtcctcgcacggcctggagcaggagcgcgtggccggtacgcatttctctgtggcggtgctgaccaacctgacccaggaccacctcgactaccacggctcgatggccgagtacgaggccgccaaggagagcctgttccgctgggacggcctgcgcaccgcggtggtcaaccgcgacgacgccatgggccagcgcctgctggcggcggacgccgccgccatcggcgcgccgcacgtgatcgaatacggcatcgacggcccgggcgcggccacggtgcgccgcccgcgcggcgagtggctgcgcgccaccaacgtgcgcgccacgcccaccggcaccgccttccatatcgacggcagcttcggcagcgccgagatggccacaccgatgatcggcgccttcaacgtcagcaacctgctggcggtgctgggtgcggcgctggccaacggcgtggcgtgggacgcggccatcgccgcgctgcgcgcgctgacgccggtcgaagggcgcatggagttgttcggtgccgccggcggcccggatgcgccgctggccgtggtcgactacgcccataccccggacgcgctggcgcagacgctggccgcgctgcgcccggtggcgcaggcgcgcaacggccgcctgtggtgcgtgttcggctgcggtggcgaccgcgacccgatcaagcgcccgctgatgggcgcggtggccgagcgcgaggccgacgaggtcatcctgaccagcgacaacccgcgcagcgaagacccgcaggacatcctggacgccattgccgacggcatggccgtgcgcgcgcgcgcgcgccagatcgaagaccgcgccgccgccatcctctatgccgtcaggcacgcggcaccggccgacgtggtgctggtggcgggcaagggccatgaggccacccaggagatccaggggcgcaagcgcccgttctccgatcgcgaacatgtacgactggcgcttgccacccgtggagtatcggcatgagccagaccccaatgaccaacttgcagcaagccgccggctggatcgccggcgcgcgcgtttgcggcgacggcgccgtggagttttcgcgcgtgcatagcgacagccgcagcgtcgagcccggcgacctgttcgtcgctctcaagggcgagcgcttcgacgcgcatgactttatcgccgacgtggtggcgcgcggcgctgccgccgtgctggtcagccgcgaggtcgatgccggcgtgccggccatcgtcgcgccggacacgcgcattgcgctgggcgagctcggcgccggctggcgccgccagttcacgctgccggcggtggcggtgaccggcagcaacggcaagaccacggtcaaggaaatgatcgcggccatcttcgccgcggcggtaggcgaggagcagcgcctggccaccggcggcaacctgaacaacgatatcggcctgccgctgacggtgctgcgcctgcgcgccacgcacaagctggcggtgctggagctcggcatgaaccatccgggcgagacggtctacctggccggcatcgcccagcccaccgtggcggtgatcaccaacgcgcagcgcgagcaccaggagttcatggtcagcgtggaagccgtcgcccacgagcacgctgccgcgattgcggcgctgcctgccaacggcgtggcggtgtacccgctcgacgcggaaagcggcggcgcctacgcgccggtgtggcgcaatgccgcgggcgcgcgccgtgcgctgtcgttcggcacctcgcagcgcgccgatgtgcacgccaccgtgacgctggtcgacggcgcacaggtgatgcaggtacgcgcgcctggccatgccttcgacgtgcgcctggcgctgctgggtgagcacaacgtgcgcaacgcgctggcggccatcgcctgcgcgctggccgcgggggtgcacgtgccggcgatccagcggggcctggccgggttccaggcggtcaagggccggctgcaggtcaagtacacgccgggtgggacggtagtcatcgacgacacatacaacgccaaccccgactccatgcgcgccgccatcgacgtgctggccggctttgccgcgccgcgtgtgctggtgctgggcgacatgggcgaagtgggcgaccagggccccgcattccaccaagaaatcggtgcctacgccaaggcacgcggcattggcacgctgtgggcgaccggtgaactggccgtgcatgcggtgcaggcattcggcgcgggtggccggcatttcggcaccgcggaagccctggcaaaggcgctggaggaagacagcaggggcatggtggagcaagtgggcgccgtgctggtgaagggatcgcgcttcatgcgcatggaacggatggtcgcggcgctggtcgcagacacttccgcacattaaataagacaacacgatgttattggctctggcccagtggctgcaaaacgactacagcttcctccgggtcgtcaactatctgactttccgcgcggtgatggccaacctcaccgcgcttctgatcgggctggcgttcggtccgtgggtgatccgcaagctgaccgagctgaaggtcggccaggcggtgcgcaccatcggcccgcagacccacttggtcaaggccggcacgccgaccatgggcggcgtgctggtgctggtctcgatcgcggtgtcgacgctgctgtggtgcgactggggcaaccgttttatctgggtggtgatgctggtcaccttcggctacggcgcgatcggctgggtcgacgactaccgcaaggtggtgtatcgcgacccgcgcggcatgtcgagccgcgagaaatttttctggcagacgctgatcggcctggtggccgcggtctacctggcgttttcggtatcggaaagcagcaacgtgcgggtgtgggagctgttcctgaactgggtcgagggcgggctgtcgttggacatgccgtacaagtccaacctgatcgtgcccttcttcaaggagatcagctacccgctgggcgtggccggcttcatcgtgctgacctacctggtgatcgtgggctcgagcaacgccgtcaacctgaccgacggcctggacggcctggtgatcatgccggtggtgctggttggcggcgggctgggcgtgtttgcgtacgtaatgggcaactcggtctacagcaagtacctgctgttcccgcatatcccgggcgcgggcgaactgctgatcttctgctcggcattggccggcgcggggctggccttcctctggttcaatgcgcacccggcgcaggtgttcatgggcgacgtcggcgcgctggcgctgggcggcgcgctcggcacggtggcggtgatcgtgcgccaggagatcgtgctgttcgtgatgggcggcatcttcgtggtggaaacactgtcggtgatggcgcaggtgacgtggttcaagatcaccaagcgccgctatggcgaaggcaggcggctgttccggatggcgccgctgcaccaccatttcgagctgggcggttggaaggaaacccaggtcacggtgcgcttctggatcatcaccatgctgctggtgctgatcgggttgtcgacgctgaagttgcgttaatggttgcgcgggtcagggactgacggcgctttctatatagatacaggaaaacaaaggcaggaaatcgaagtgtttggcgagctgcaaaaacctcatgtgctggtactgggccttggtgagtcgggcctggccatggcgcgctggtgtggcctgaacggctgcgcggtgcgcgtggctgacacgcgcgaggcgcccgccaaccttgtcttcctgcaggccgagctgacttcggccgaattcgtcggcggcccgttcgccgacagcctgctcgacggcatcggcctggtggcgatcagtccgggcctgtcgccgctggaagccgccactggcgcgctgctggccgcggcgcaggcgcgcggcatccccgtgtggggcgagatcgagctgttcgtgcgcgcgctgcgccacctggaagccgagtccggctacgcgccgaagatcctggcgatcaccggcaccaacggcaagaccaccaccaccgcgctgaccggccggctggtggagcgcgccggcaagagcgtggcggtggcgggcaatatcagcccgtcggcgctggacaagctgtcggcctgcatcgcctcggcatcgctgccggaggtgtgggtgcttgagctgtccagcttccagctggaaaccacgcacacgctggcgcccgccgcggcgactgtgctcaacgtcacccaggaccacctggactggcatggctcgatggaagcctatgccgcgtccaaggcgcgcatcttcgggccggccggcagcgagtgcgtgcaggtgctcaaccgcaacgaccgcctgaccatggatatggcgcggcccgggagcacgccgctgacctttggcaccgacctgccggaaacgccgggcagcttcggcatcctgcgcgagggcggcatgccctggctggtgctggccgaacccgatccggacgcggaaggggagggcaagccgcgccgccgcaaggccgccgaggtggcccgggaagccgtgccggtgcgccacaagcgcctgatgccggccgacgcgctgcatatccgcggcatgcacaacgccaccaacgcgatggccgcgctggcgctgtgccgcgccatcgacctgccgatgaacgcactgctgcacggcctgcgcgaataccgcggcgagccgcaccgcgtggagtgggttgcgaccatcgacgatgtcgagtatttcgacgacagcaagggcaccaacgtgggcgcaaccgtggccgcgctgtctgggctggacaagcgcgtggtgctgatcgccggcggcgaaggcaagggccaggatttctcgccgctggccgcgccggtggcgcagtacgcgcgcgcggtggtgctgatcggccgtgccgcgggtgaactgcgcgatgcattgcagggcagcggtgccagcctggtcgacgccggcacgctggaagaggccgtgaccaaggctgccggactggccgagagcggcgatgtggtgctgctgtcgccggcatgcgccagcctcgacatgttccgcaactacgtgcatcgcgccgaggtgttccgcggcgccgtggaagaactggcgctgtcccgggggatcctgccatgagcgaagcacaggtcaagcgcagcggctttatcggcgccaccatcggcaatgcctggggtggcctgcgcgacgccgtgtcgggcgtcaagccgacccgctcgcgcatgatggagtacgaccagcccatgctgtgggtgtcgatcgtgctgctcgcgctcggcctggtgatggtctattcggcctcgatcgcgctgccggactcgccgcgctacgccaactatcgcgagagccacttcctgatgcgccatgcgttcgcgctggggatcgggctgtcggtcgggctggcgtcgttccaggtcccggtcaaggtgtgggaccgctacgcgcccaagctctttatcttcgcgctgatcctgctggtgatcgtgctggtgccgttcgtcggcaagggcgtgaacggcgcgcggcgctggattccgctgggcgtgatgaacttccagccgtccgagctgatgaagctggcggtggtgctgtacgcggccaactacaccgtgcgcaagcaggagtggatgcagaccgtgtccaagggctttttgccgatgggcgtggcggtggtggtggtgggcatgctgctgctgctcgagcccgacatgggcgcgttcctggtaatcgccgcggtggcgatgggcatcctgttcctgggcggcatcaacggcaagctgtttgccgggctggtgggcgtggcaatcggcgcgttcgcgctgctgatcacggcttcgccctggcggcgcgagcggatcttcgcctacctgaacccgtgggaagagagcaacgcgctgggcaaggcctaccagctcacgcactcgctgatcgctttcggccgcggcgagtggaccggggtggggctgggcggcagcatcgagaagctgcactacctgcccgaggcccataccgacttcatcctcgcggtgatcggcgaggaattcggctttgtcggcgtgctggtggtgatcgtgctgttctactggctggtgcggcgcgccttcaatatcggccgcaccgcgctgcagctggaccgcacctttgccggcctggtggccaagggcatcggcgtgtggatcggctggcagacctttatcaatatgggcgtgaatctgggcctgctgccgaccaaggggctgacgctgccgctggtgagctatggcggctcggggatcttgatgaactgcgtggcgctggcgatcctgctgcgcattgattatgaaaatcgagtattgatgcgcggagggaaggtatgaccggaccgcgcaccttgctcgtgatggccggcggcaccggggggcatgtgttcccggggctggcggtcgcgcacgcgctgcgcgagcagggctggaaagtggtctggctgggcaaccgcaccggcatggaagccacgctggtgcccaagcacgacatcccgatggagttcatccagttcggcgggctgcgcggcaaaggcctggtgaccaagttcctgctgccgctgaacctgctgcgtgcgttctggcagagcatagccgcgctgcgccgggtgcgcccgagcgtggtgctgggcatgggcggctatatcaccttcccggccggcatgatggcgtcgctgctggggcgcccgctggtgctgcacgagcagaactcgattgccggactggccaacaaggtgctggccaaggtggccgaccgcgtgctgtgcgcgttcccggacacgctgcccggcggcgaatggaccggcaacccggtacgcgaggaactggcgcacctggacgcgcccgaagcgcgctatgaccagcgcagcggcccgctgcggatcctggtggtgggcggcagcctgggcgccgcggcgttgaacgaggtggtgcccaaggccatcgcgctgctgcccgggggcgagcgcccggtggtcacgcatcaggcgggcgcgaagcagatcgacacgctgcgcgccaactacgcggccgcgcaggtgcccgcgcagaccctgccgttcatcgacgacatggcgcgcgcttacgccgatgcggacctggtgatctgccgcgctggcgcgatgacggtgtcggaagtggctgccgcgggtgtggcggcgatgttcgtgccgttcccgcatgcggtggacgaccaccagaccaccaacgcggaatttttgtcgaagcagggcgcggccctgctggtgcagcagaaagacctgacggccgaggggctggcgcaaaccatcgccagcctgacccggccgcagctgaaagacatggcgcgcctggcgcgcggactggccaaacctgaggcaacccggcgcgtcgccgagatctgcagtcagctggccagggactgaagcctatataagcagcaatcgaatgaagcatatcgtcaagaacatccacttcgtgggcatcggcggcgccggcatgagcggcatcgccgaggtcctgctgaacctgggatacaaggtctcgggctcggacgtgggcaacaatgccgccacgcggcgcctggcatcgctcggcgccacggtcatgcacgggcatgacgcggccaacgtgaccggcgccaacgcggtggtggtgtcgaccgccgtcagcggcgacaaccccgaagtgctggccgcccgtagcaagcgcatcccggtggtgccgcgcgcagtgatgctggccgaactgatgcgcctgaagcagggcgtggccatcgccggcacgcacggcaagaccaccaccaccagcctggtggcgtcggtgctggccgaaggcgggctggacccgaccttcgtgatcggcggccgcctgaactcggccggcgccaacgcgcgcctgggcacgggcgacttcatcgtggccgaggccgacgagtcggacgcatcgttcctgaacctgttcccggtcatcgaggtcatcaccaatatcgatgccgaccacatggacacctacgggcatgactttgcccggctcaagcaggcgttcatcgaattcacccagcggctgccgttctacggcatcgcggtgctgtgcgtcgacgaccccaacgtgcgcgagatcctgccgttcgtgtccaagccggtggtgcgctacggctttgccgaggatgcccagatccgcgccgtggacgcgcgcgcggtcgacggccagatgcacttcaccgtgcagcgccagctcaacggccataccgagccgccgctcgagatcgtgctgaacctgcccggcctgcacaacgtgcagaacgcgctcgcggcgatcgccattgccaccgagctggaggtgcccgatgccgccatcgtcaaggcactgcgcgagttccatggcgtgggccggcgcttccagcgctacggcgaggtggccacgcccgacggcgccggcaccttcaccctggtggacgactacggccaccacccggtcgagatggcggccacgctggccgccgcgcgcggcgcgttcccggggcgccgcctggtgctggcgttccagccgcaccgctttacccgtacgcgggattgctttgaggacttcgtcaaagtgctgggcaccgtcgatgcgctgctgctgtccgaggtctacgccgccggcgaagccccgatcgtggccgccgacggccgtgcgctgacccgcgcgctgcgcgtggccggcaaggtcgaacctgttttcgtggagcagatggaagaaatgccgcaggccatcctggatgccgtccggccgggcgatgtggtcgtgacgatgggcgcgggctcgatcggggccgtgccggggcagctggtgtcgcaccagcaatcgacgcaatcaacgcagggaggccaggcatgagcttcgtggcccatcccaatatcgatcccaagtcgctgggcaaggtcggcgtgctgctgggcggacgctcggccgaacgcgagatctcgctgatgtctggcaacggcgtgctggccgcgctgcagtcgcgcggcgtggacgcgcacggcttcgacccgggcctgcagagcgtggccgagctggccgctgccggctttgaccgcgtctttatcgcactgcatggccgctatggcgaggatggcaccatccagggcctgctcgagcagctgggcgtgccgtacaccggcagcggcgtgctggcatcagccatggccatggacaagcaggccaccaagcgcttgtggatgacctatggcctggccacgccgcgctttgccatgctgcatgcggacactgattttgatgccgtggcggccgacctgggcctgccgctgatcgtcaagccggcgcgcgagggctcgtcgatcggcctgaccaaggtcactgccgccgaccagatgcgcgcggcgttcgagaaggccgcggcgctggacaacgacgtcattgccgagacctttatcgacggcgccgaactgacctgcccgatcgtgggcgagggcgacagcgccgaagcgctgccggtgatccgcatcgttgcacccgaagccaactacgactatcaaaataagtactttactgacgatacccagtacttgtgcccgtcgggcctggatcccgaagtcgaacgcgaggtccgggcgctggcggtgcagtcctaccgcgtgctgggctgccgcggctgggcgcgtgccgacctgatgctgcgcgccgacggcaagcctttcctgctcgagatgaatacctcgcccggcatgaccggccattcgctggtgccgatggcggcgcgcgcggttggcatcagctacgaggacttcgtgatgcaggtggtggccgcggccacgctggacctgcatcccaacgagcattggaaacccgaataacgcaaccgaacaggaccgtaccggaccatgtggcataacgcacgcctgctcaacctgatcgcctccgcgctgtacgcgctggtggtgctgatggcgctcgcggcaggcctgctgtggctggcgcagcggccggtgttcgccatcacccatgtggagatcggcccgctggacggcggcgccctgcgccacgtgaacgcgcccagcgtgcgtgccagcgcgctgggcaagctgaccggcaatttcttcacgctggacctgaacgcggcccggcaggcattcgagtcggtgccctgggtgcggcgcgccagcgtgcggcgcgaatggcccaacggcctggcggtcgaggtcgaggaacacgaggcgctgggcacctggggcacgcccgacagcgggcgcctgatcaatacctatggcgaggtctttgtcgccaacaccgccgaggcggaagaagacgcacagctgctggcgctggacgggccgccggacagcgagggcgatgtgatcgagaagctcgaggtcatgcgccagtggttcaagccgctcaaggccgagccgctggcggtggccctgtctggccgctatgcgtggcgcgcgaagctgtccaacggcatggaggtcgaactgggccgcgagcagaacgatgaggatcgcgtggcgatggaccagcgggtccggcgcttcgtcgcggcctggccgcaggtcacccagcaatggggcagccagatcgagtatgccgacttgcgttatcccaacggctttgccatccgcgccgccaatgcccgcttcctgaccgaggcgcagatcgcagcggcggtcagggcggagaaggcggcgaaagcagcgaaggcggccaagccggcgccggcggcagcagcggtttcaggtacttccaacaacaatccgacgcgactgaagagcaagaacgcggagaaaacccgatgagcaaggaatacaaggacctgttggtcggtctcgatatcggcacctcgaaggtggcggcggtggtcgcagaactgcgccccgacggcagctacgaggtgatcgggatgggccagtcagagtccaagggtctgaagaaaggggtcgtggtcaatatcgaggccaccgtgcagtcgatccagaaggcgctggaagaggccgagctgatggccgactgcaagatttcggaggtcttcaccggcattgccggcagccacatccgcagcttcaactccagcggcatggtggcgatcaaggacaaggaggtcacgcagaccgatgtggcgcgcgtgatcgagaccgccaaggcggtcaatatcccgaccgaccagcagatcctgcacatcctgacgcaggaattcatcatcgacggccaggaggacgtgcgcgagcccatcggcatgagcggcatccgcctggaagtgaaggtgcatatcgtcaccggcgcggtcagcgccgcgcagaacatcgtcaagtgcgtgcgccgctgcggcctggaagtgcacgacctgatcctgcagccgctggcttcgagcctggcggtgctgaccgaggacgagaaggaactgggcgtggtgctggtcgacatcggcggcggcaccaccgacatcgccatcttcagcgaaggcgcgatccgccatacggccgtgatccctatcgccggcgaccagatcaccaacgacatcgcgatggcgctgcgcacgccgacgccagatgccgaggacatcaagatccagtacggcatcgccaagcaggcgatcgccgacccggacgacatgatcgaagtgccgggcgtgggcgaccgtggcacgcgcacgctcagccgccaggcgctggccgcggtgatcgagccgcgcatcgaagagctgtactcgctggtgcaccaggtggtgcgcgagtcgggctatgaagaactgttgtcgtccggcgtggtcatcaccggtggtaccgcgatgatgccgggcatggtcgagctgggcgaggacatcttcctcaagcccgtgcgcgtgggtgtgccggagtaccgcggcaacctgcacgaggtggtgaagagcccgcgctacgcgaccgtgatgggcctgctgctggaaggccgtgtgcaacgcatgcgcggacgcaaggtggcggtgcagagcgggtcggtcaagcaggtgtggacccgcatgaaggaatggtttgtcggcaatttctgatcaatgcggaaattgacgcgctgacgatgcaacggcgcgcaggcagggcggtctaccggacaggcctgtgtgccgagtggaagttttctggttttctttttattggtttcttgttcagaaaccaggggttgcggcggggaggctgcatcgtctggggactgatttttctcggaggcagtgatggactttgacatgatcgaaacggaagtgcaggacggcaccatcatcaaggtggtcggcgtgggcggtgcgggcggtaacgccgtgcagcacatgatcagccgcggcgtgcaaggcgtcgaattcatctgcatgaacaccgatgcccaggcgctcaagcgttcgagcgcttcgcgcgtgctgcaacttggcaatacgggcctgggcgctggcgccaagccggaagtcggccgcaactgcgccgaatcggcccgtgatcagatcgccgactccctgcgcggcgcgcacatggtcttcatcactgccggcatgggcggcggcaccggcacgggcgccgcgccgatcgtcgcgcaagtggccaaggagatgggcatcctgaccgtgggcgtggtcagcaagccgttcgacttcgaaggcgcgcgccgcgccaaggtggccgaacacggttccagcgagctggaatcaagcgtcgactcgctgatcgtggtgctcaacgagaagctgttcgaagtgatgggcgacgacgccgagatggacaagtgcttccagtgcgccgacgacgtgctgcacaacgcggtggccggcattgccgagatcatcaacgttgacggcctggtgaacgtcgacttcgaagacgtgaagacggtgatgggcgagcagggcaaggccatgatggggacggccaccgtgtcgggcgtggaccgcgcccgcctggcagccgagcaggccgttgccagcccgctgctggaaggcgttgacctgtccggcgcgcgcggcgtgctggtcaacatcaccgccagccgttcgctgaagctgtcggaaaccaaggaagtcatgaacaccatccgcagctacgcggcggaagatgcgaccgtgatcttcggtacggtgtacgatgactcgatgagcgatgcgctgcgcgtgacggtggtggccacgggcctgggccgctcggccaagaagcaacagccgatgaccctgctcaagaccggcacggacaacatgccggtgcagatgatggccaacatgaccgccgccgcggccacgcacagctcgccggactacagcaacctggatacgccggcagtgtggcgcagctcgcgtgagtcggcgtcggctcacgtggcggcgctgcaggaaaagggtgtggatacgtacgacatcccggccttcctgcgcaagcaggcagactgagccctgcctggcgcggcatcggtgcctccaccggccgcctgacggaacgcgtcgccttgtcgcgatgcacgtgcgctccccatccgcgcgtgccttgcatggactgacgtgaaccgccgggctgctggcggcgccgcgcctgcgccggactgagcttcacccgcatcccgccgggactggcgtgccgctggccgcctccccggactggtttcccgccttcccggtcgggatgtatcagcgtccgcgcggcgcacccaagaggtgcgccgcgcggacgtctttgtagcaaggtctttgtagcaaggtgtatcggatccgcgccggatgtcaccggatgtgacccggctttggcaatgcgggcaaggcgcctatgatcttgagattgcccgtctgactgagtgcgggcgtctgcgccccggcatccggactattcttcagaaaacccagaaggaccacgacccatgatcactgtcggttcccgcgtccccgacgccacgctgcaggaattcttcgaaaccgaaggcaacggctgtgcgctcggccccaatgccttcaaggtggcggacctggtccgcggccgcaagatcgtggtgttcggcctgcccggcgcttttacgccgacctgctcggccaagcatgtgccgggctttgtgcagcacgccgcggcgctgcgcgaggccggcgtcgacgaggtctggtgcgtgtcggtcaacgacgccttcgtgatgggcgcctggggccgtgaacagcagactggcggcacggtgcgcatgatggccgacggcagcgccgagtggacccgcgcgctgggcctggaccaggacctgggcgcgcgcggcatgggcgtgcgctccaagcgctacgcgatggtgatcgacgacggcgtcgtcacccggctcgacgtcgaggcaccgggcgaattccgcgtcagcagcgccgaagcagtgctggcggcgttgcgtggctgacacagtcatccgggtaaacgtggataatacgcaacttgttaaggggatgttaacagccggaaacaaaacccggctgcagcgcccctgaggtggtggtaaaatcccttaatcataaaagctgcccgatagatttttataatagttgaggctgtcatgctcaaacagcgcaccatcaaatccctggtaaagaccgttggcatcggcctgcactcgggacgcaaggtcacgttgaccctgcgtcccgcgccggcggacaccggcatcgtctttacccgcgtcgacctgcccgaggccgtcgagattcccgtggccgcgtcggccatcggcgacacgcgcctggcatcggtgctgcagaaggatggcgcgcgcgtttcgaccgtcgagcacctgatgtcggcctgtgcgggcctgggcatcgacaacctctatgtcgatgtcgacgccgaggaaatcccgatcatggacggcagcgccgcgtccttcgtgttcctgctgcagtcggccggcattgaagagcagaacgcgctgaagacctttatccgcgtcaagaaagcggtggaagtgcgcgagggcgacaagctggcgcggctggagccgttcttcggcttcaagctgtcgttcaccatcgacttccgccacccggcggtcgacaagaccggccagactttctcgatcgactttgccgacaccagctacgtgcgcgagattgcccgcgcccgcaccttcggctttgcgcacgaggtggaagccctgcgcgagatgggcctggcgcgcggcggcagcctggacaacgcgatcgtgctggacgagcaccgcatgctcaacaatgaagagctgcgctacggcgacgagttcgtgcgccacaagatcctggatgcgatcggcgacctgtatgtggtgggccacccgctgatcggcgcctatgtggcgaacaagtcgggccacggcctgaacaaccagctcctgcgcgcgctgctggccgaccaggaagcctatgaactggtcaccttcgaccgcgtcgaggaagccccggtcgcgttcctgccgcaggcgcagccggcgtttgcctgatcctggcgaactggcgcagaaaaaagccgacccgagggtcggctttttcgtgttcggcaacgggctagcggtgatgggcgagcagcgtattgagcgcgtcgcgcagcggcgaatccggcaggctgcgcgccagctggtccagattggcgagtcccgtgggcgtcatgcggccaccggtgcgctggcgttgcacgggctccacttcccagtccgcgtggcgcgacacctccggctgcacccgcacccggatcgcggtgatatgcgagccgcgctgctgcagccgtgccagcagcgtcggcactacctggcgcacgcgggcagcggcggcgccgtgcgcggccagcaacagcagcacctgggcgctcgggtcggtggcgtcacgcttgaccccggccacggccaggccgtcgcgcatgccggcgggcagcagtgccagcacctcggcctcgagcaccgacagctggcgcgcggtctgcatcagcgtcgaaaccgggccggccttggccagccagtcgttgagcggcttggcggcgggggtctgcagggcgtgatgggtgaagcggcgcatgcatgcattctagcaaggggcgcgctggccgccttgcccgactgtggattgaagctgcggcggccgccccaaactgtggccaatgggcgcacgggcaatcacgcgggcaatctgcggaccacacgcgtggccgacatccggcaggcttgcctgcccttgcgggacggggccaggcgcgttccggccgtgaccccggcacatgataaactcggcgttttgcgccaatctatccattcctcgcccggccgccggagcagcccgcatccctggggtgccgcccggttccgcgcaggtgaaagcaatcgatgatcaccggccttctcaagaaagtcttcggcagccgcaatgagcggctgatcaaacaatatcgccgcacggtggcgcagatcaatgcgctggagccgaagttcgagcagctctcggacgacgaactgcgcggcatgacggagaccttccggcagcgccacgccggcggcgaatcgctcgaggcgctgctgcccgaggccttcgccgtctgccgcgaggccagcaagcgtgtcatgaagatgcgccacttcgacgtgcagctgatcggcggcatggtgctgaacgacaacaagatcgccgaaatgcgcaccggcgaaggcaagacgctgaccgcgacgctggccgtgtacctgaatgccattaccggccagggcgtgcacgtggtgaccgtcaacgactacctggcgcagcgcgatgccgagtggatgggccggctgtacaacttcctgggcctgtcggtgggcgtgaacctgtcgcagatgccgcacgacgccaagcaggcggcgtacaactcggacatcacctacggcaccaacaacgagttcggcttcgactacctgcgcgacaacatggtctacgacccgtcgcaacgcgtgcagcgcccgctcaactacgccatcgtcgatgaagtggactcgatcctgatcgacgaggcccgcaccccgctgatcatctccggccaggccgagaaccagaccgacctgtaccagcgcatgaacggcatccccaagctgctcgagcgccagatcggtgaagagaaggccgacggcaccggcgtcgagaagccgggcgactactacgtcgacgagaagggccaccaggtctacctgaccgaagccggccacgagaaggcagaagagatcctgtcgcagcaaggcctgatcggcgagggcgagtcgctctacgcgccgcagaacatcacgctgatgcaccacctgtacgccgccctgcgcgcgcacagcctgttccatcgcgaccagcactacgtggtgcagaacgacgaagtcgtgatcgtcgacgagttcaccggccgcctgatgaccggccgccgctggtccgacggcctgcaccaggccgttgaggccaaggaaggcgtcaccgtccagcaagagaaccagacgctggcgacgatcaccttccagaactacttccgcatgtacaacaagctggccggcatgaccggcacggctgacaccgaagcgtatgagttccaggagatctacggcctggaagtggtggtgatcccgaccaaccgcccggcccagcgcaaggaccagcaggaccagatctacaagaccggcaaggagcgctacgacgccgtggtgcgcgatatccgcgactgctacgagcgtggccagccggtgctggtgggcaccacctcgatcgagacctcggaatacctgtcgggcctgctcgatcgcgagcaactgccgcaccaggtgctcaacgccaagcagcacgcgcgcgaagccgagatcgtggcccaggccggccgccccaagatgatcaccattgccaccaacatggccggccgcggtaccgacatcgtgctgggcggcaatgtggagaagcaatccggctttatcgaggcggacccgaacctgtccgacgccgagaaggccgcacgcatcaagcagctcgaggatgagtggcattcgctgcacgagcaggtcaaggccgccggcggcctgcatatcgtcggcaccgagcgccatgagtcgcgccgtatcgacaaccagctgcgcggccgtgccggccgccagggcgacccgggttcgtcgcgcttctacctgtcgctggacgaccagctgctgcgcatcttcgccggcgaccgcgtgcgcgccatcatggaacgcctgaagatgcccgagggcgagccgatcgaagccggcatcgtcacgcgctcgatcgaatcggcgcagcgcaaggtcgaaggccgcaacttcgacatccgcaagcagctgctgcagtacgacgacgtcgccaacgaccagcgcaaggaaatctacaagctgcgcaacgacgtgctggaagcccaggatgtcggcgacatggtgaccaacctgcgcgagagcgtgctggttgagctgttccgcgaccacgtgccggccgacaccatggaagagcagtggaacatctccggcctggaaacgcgcctgcgcgaggactggggcctggaagtgccgctggcgcagaccatcgagggcgcgcagagcatcgaggacgaagagctgctcaacctgatcatgaaggcggccgcggagcgctacgatggcaaggtcgcgatggtcggccgcgagtcgttcgccggcttcgagcgctcggtcatgctgcagagcatcgacacgcactggcgcgagcacctggccgcgctggaccacctgcgccagggcatccacctgcgcggctatgcgcagaaggatcccaagcaggaatacaagcgcgagtcgttcgagctgttcgcgcgcctgctggacctgatcaagaacgaagtcacgcgcgtgactttcaacgtgcagatccagtcgccggaagagctggagcaggcttcggaagagatcgaggaaggcctgtcgcacctggagaacatccagtacaagcacgacgagttcgccgaagggcgcgagccggtcgaggaagcgccgtcgccgcgcaccggtgcggccatggccgccgccgagctggcgctggcgggcatgcccaaggtcggccgcaacgatccgtgcccgtgcggctcgggcaagaagttcaagcagtgccacggcaggctcagctgaactgagcccggccgggtacccggcatgacgtcgttcccgctgtctggggagtgacgcgcaaggaaacgacatgcccgccctccgcgggcatgttcgtctgatgacaagcaagttgcgagcagaagccgcaagcagataacgcaagcaggaacgaggagtccacatgcccgtcaatcttccgctgccccaggcagagaacctgaaatccgtcgccggcgtggagctgggctgggccgaggcgggcatccgcaaggccaaccgcaaggacgtgctggtggtgcgcgtggccgaaggcagcaccgtggccggcgtcttcaccagcaaccgcttctgcgcggcgccggtgcaggtctgccgcgagcacctggccgctggcaagggcatccgcgcgctggtggtcaacaccggcaatgccaacgccggcaccggcgaaccgggcctggccagtgcccgcgccagctgcgacgcgctggcagcgcaactgggcatcgccgccgagcaggtgctgccgttctcgaccggcgtgatcctggagccgctgccggtcgaccgcctggtggccggcctgcccgccgccatcgccaacgcgaagccggacaactggctggccgccgccgaagccatcatgaccaccgacacgcagcccaaggccgcgtcgcgcacggtgcagatcgacggcaagaccgtgacgctgtcgggcatcagcaagggcgccggcatgatccgcccgaacatggcgaccatgctcggctttatcgccatggacgccgccgtggcccagccggtgctgcaggcgctggtctcctacgccgccgaccattcgttcaacagcatcaccatcgacggcgatacctcgaccaacgactcgttcgtgctgatcgccacgggcaagtccggcgccgtggtcgagcgcgccgaaggcccggccttcgaggcgctgcgcgacgcggtgaccgcgctggcgcaggaactggcgcagatgatcgtgcgcgacggcgaaggcgccaccaagctgatgaccatccgcgtcgaaggcggcaaggacgtggccgagtgccgccagatcgcctatgcggtggcgcattcgccgctggtcaagaccgcgttctatgcgtcggaccccaacctgggccgcatcctggccgcggtcggctacgccggcgtcgatgacctcgacgtcggccgcgtcaacctgtggctggacgatgtctgggtggcccgcgacggcggccgcaaccccgactaccgcgaggaagacggccagcgcgtgatgaagcaggccgagatcaccgtgcgcatcgcgctcggccgcggcaaggccgaagcgacggtctggacctgcgacctgtcgcacgattacgtgtcgatcaacgccgactaccgctcctgagctttccgtccttcccgtgcatgcgggaagggcatcgattcccctgccagccgataccgcgcccctagcgcgcccctgccatgtctgacctcgccgcccgcctcgacaacttccttgcccgactcgaacaatggctgccgccgcaactgagcgacgccgactggcaggaggccgtggcgttccgctggcgcaagcggcagagcctgttcggcaatatcggctacctgcagccggtgcgccagctgccgccgatccacctggacgacctgaagaacatcgagcgccagaaggatgccatcgtcgccaacacgcgccagttcgtgagcaagctgccggccaacaatgtgctgctgaccggcgcgcgcggcaccggcaagtcgtcgctgatcaaggcctgcctcaatgccttcgtcagggacgggctgcggctggttgaggtggacaaggatgacctgggcgacctcggcgatatcgtcgagctcgttgcgcagcgccccgagcgcttcgtgatcttctgcgacgacctgtcgttcgaagagggcgagtcgggctacaagtcgctcaagtcggcgctggacggctcggtggcggcgcagtcggacaacgtgctgatctacgccacctccaaccgccggcacctgctgccggagtacatgaaggacaacgagacctaccgccacaccgacgatggcgagatccatcccggcgaagtggtggaagagaagatctcgctgtccgagcgcttcgggctgtggctgtcgttctacccgcccaagcaggacgaatatctggccattgtcggccactggctcaggcactttggctgcaccgacgaggacatcgccgcggcgcgcggtgacgcgctggtgtgggcgctggagcgcggctcgcgctcgggccgcgtggcctggcagtttgcgcgcgattggggcggcaagcatggcaagccctatattgccgatgtcgccggagacgccaaggcatgagcgcggccacgcagaaccccgcgcagaccggcgccaacccgccgcgcaaggtgaccgaggtggcggtcggcgtgctggtgcagcccgacggacgcttcctgctggcgcagcgcccggccggcaagccctacgagggctattgggaattccccggcggcaagctggagcccggtgagtcggtggaggcagcactggccagagaactccatgaagagctgggccttgatgtaacgcaatgcgagcgttggcacattctggaacatgactatccgcacgcctatgtgcggctgtatttctgcaaggtcaccgactggcggggcgaccccgtcggccgcgaaggccaggccttctcgtggcagcgcacgccggtgacggtggggccgctgctgccggccaccattcccgtggtggagtggctggccgaggaatcgggcaacggctgaccctgccttcccgctgtcgggcaagcggccgcggcgcccgcttgcgcgccgccagggcctgaccaggccctgatccacaggaaaggaacctgcatgctacgtgtcgatcgtatcgccgacgacgtttccctgcctgaactgaccctgcgcggcatcatcctcggtgcgctgatcacggtcgtgttcaccgcctccaacatctacctgggcctgaaggtcggcctgaccttctcgtcggcgatcccggcggccgtgatctcgatggccgtgctgcggctcttccccggcgccaacatcctggaaaacaacatggtgcagacgcaggcctcggccgcgggcaccctgtcgtcgatcatctttatcctgccgggcctggtcatgctgggccactggcagggcttcccgttctggcagacgctggcgatctgcgcggccggcggcatgctgggcgtgctgttcagcatcccgctgcgccacgcgatggtggtgcagagcgagctgccctacccggagggcgtggccgcggcggaaatcctgcgcgtgggcagcgccgcgccagaccaggccgcgccggggcagaagccccaggcgaccggcctggccgacctgatggccggcggcctggtggcggggctgttcagctttgccgccggcgggctgcgcctgctggccgagggcgccaacttctggctgtcggccggggcctcggtggtgcggctgtcgatggggttctcgctggcgctggtgggcgcgggctacctggtcggaatcgtcggcgggctggccatgctgctcgggctggtgctgacctggggcgtcgcggtgccgtggctgacggccatcacgccgcgcccggacggcgccacgctgtcggccttcggcgccatggtgtggagccagcaggcgcgcttcatcggtgccggcaccatcggcattgccgcgatctggacgctgctgtcgctggccgggccgatgctgtacggcatccgcgcctcgttcggcgcgctgcagggcgggccggcggggcagggcaagatgccgcgcacgcagcaggacatgccggccagatggatcgggctggtgatgctggggctgctggcggtgctggtgacggtattcgcctggttcctcgcgccggcgccgctcgatggcggcgcacgctggcgcctggtgatctacgcggtggtgttcgcctttatcttcggcttcctggtggcggcggcgtgtggctacatggccgggctggtgggctcgtcggccagcccgatctcgggcatcggcatcatcgcggtgatcctggtgtcgctgctgatcctgctggcgggcaaggccgacgggctgctggccacgcccgagggcagaaacttcgcgattgcgctggcgatcttcaccacctcggcggtggtggcggtcgcctcgatcgccaacgacaacctgcaggacctgaagaccggctggctggtcggtgccacgccgtggcgccagcaggtggcgctgctgatcggctgcgcggtaggcgcggcggtgattccgccggtgctggacctgctctacagcgcctatggcttcgccggcgcgctgccgcgtgcggacatggaccccaaccaggcgctggccgcgccgcaggcgacgctgatgaccgcgatcgccaccggcatcttcacccgccagctcaactggaccatgatcctgatcggcatcgggctgggcgtggtgctgatcgccatcgacgaggtgctgcgccgccgccgcggcgcggcgcggctgccggtgctggcggtgggcatcggcatctacctgccgccgaccatcagctcggcgctggtggtgggcgcggtgctgtcgtggctcctgctgcgcagcgagcgccgccgcgccagcgcgcgcggcgacgacgtcaagctggcgctggaacatgccgagcggcgcggcacgctgctggcctcgggcctgatcgtgggggaaagcctggtcggcgtgatgctggccgcggtaatcggcctgtcgggcagggatgcgccactggcgctggccgggcccgggtttgaagcgaccgcgcagtggctgggcctggcggtgttcgcgctggtatgcgtgggcttctaccgccgcgtgctggcggcggcgcactgaaccgcgagggacgctgaaggcgagggcgcttcagtcgtcctcgtcttcagtctggtcggcggaggtctcgcccggcttgccgccgatcacgtatttctcggacgcccaggcgccgagatcgatctgcttgcagcgctcggaacagaaggggcggaatttgttgtcgggcacccaggccacctcggtgccgcaggtggggcatttgacgacagcaggcatagcgttcagcgcaggcttcagaaattgcagagtttcagcaggaacgggatatccgcatcgaccgagcgtgggcgcaggtcgccgtcctgctgcgtgaagcgcacccacagcatgtacttgttggcgctcatctcggggatgaaggccagcagcgagtcatccaggtagacctgcatcagctggtagctgcgaccggacagcatttgctggtagctgccgccggtggcgatcaccttgccgctctggccggcttcgcgcagcaggcgcagcacgatggtggtgcccatgcgcagcgacagcagcggacgtacccacttcaggatatcggcgcggcggtcttcggcggggcggtgctgccaggcatagtaggccggcaggtcgaactcgcaggtgccgccggggatgatcgcgcggctgcggatgctggtcagccactcgttgtcggccagcagctggccggccttgcccacggtctggttgagcatggcgatgccttgctcgatctcgccgatgacggcgtccagcgcctcctggtcgatctgcgggttggcgcgcagtggcgccagtgcctggcgctggcgttccagttccttgatcaggtcggtcttgaggtcggcgcggccggcgacgtcgatgatctcgaacagcgtggtcagcgcgacatggtgctggtgggcatgatcctggccgagaaagtattccagccgatcgaacaggtcctccaggcgcaggagtgtcctgatgcgttcgttgaaagggtattcgtacagaatcaagtgcaatgtccgtgcagggcgtcgggcgctttcaggagcggcccggtgcagaatgaggcccgggaaatgccggaaggggcgatatatggcgggcggttgccgccagtatgcggtaatttccccgcatattccagcgcattctatgcgagacacgggccgaggacaatgtcgcgtgcatgatgccatgcgctggcgcgccgggttgcgcgttatggatggaccctggccgccgccgacagttcacgatagtagcggtcgagccggtcgacctggtccaccagcgcctccaccggaccgtcgttgtcgatgacgtcgtcggcacatgccaggcgctcggcgcgggtggcctgtctggccatgatggcctgcacctgctcgcggctgaagccgttgcgcgacatcacgcgcgctacctgggtggcctcggtgcagtccaccaccagcacgcggcccacgcgctcgcgccatgagcccgattccaccagcagcggcaccacgtagatcaggtagggatggtcgccggcatcgcggatcgcgtgggcgcgctcggtggtcagtgcacggatcagcgggtgggtgatcgcttcaagccgagccttggctgcggggtcggcaaacaccagtgcgcgcatcgcgtcgcggtccatggcgccgtcgggacgcaggcaggccgggccgaaggcctcgaccagcgccgggatggcgcgcccgcctggggcggtgatctcgtgcgcgagcaggtcggtgtcgatgatcgcggcaccgcgcgcggcaaacatgtcggccacgcgggtcttgccgctgccgatgccgccggtcagtccgatttccagcatgtgaagctctgttgacgatgttgccgcaacgataccagcttcagcggagatcgtcggacaccgtcatggccatgcaaacagcggcagcacgccggggccgaacagcagcaccaccacgccggcgagcgcgatgaagggcccgaacgggaagggcgtgtcgcgttcctgccggcgcagcgcgatattggccagcccgaacagcacgccgaccaccgacgacagcagcaccagcgccggcagcgcctgccagccgagccaggcgcccagcgccgccatcagcttgaagtcgccaaagcccatgccttccttgccgcgcaccagccggaacagccagtaggccgtccacagcaccaggtagccggcagccgcgccgatcacggcgtcgggcagcgtcacgaacacgccgcccaggttcagcagcaggcccagccacaacagcggcagggtgatctggtccggcagcagttgcgtatcggcatcgatcatggtcagcgccagcagcgcccacaccagcaccagcgcggccagggcctgtccgccggggccgaagcgccacgccgccagcgcgctcagcacgccacaggccagctcgaccagcggatagcgcacactgatcggcgcctggcacgccgagcagcgcccgcgcaggaacaggtagctcagcaccggcacgttctcccacggcgcaatcgcgtggccgcaatgcgggcaggccgagcgcggcaccatcaggttgtagcggccggggtagggcagcgggtcgccgcgcagctcggcgatatagttggcctcgtcgcgctccatcatgcgcggcatccggtggatgaccacattgaggaagctgccgaccaccagcccgagcagcgcggcggccgccaccaggaaggcgggcggcaacgccgccagtgcctccaccagcggcgcgccgccggtggaggccggcgaagggtagggagaagcagaccacgaagacaacatcgcttacaccacctgtcccagcttgaagatcggcaggtacatcgccaccaccatgccgccgatcagcacacccagcaccacgatgatcagcggctcgatcaggctggagatcgcggccacggcatcgtcgacctcgcgctcgtagaactccgccaccttcagcagcatattgtccagcgcgccggactcctcgccgatctgcgtcatctgcagcaccatgttgtcgaacacatgggtggcctgcatcgcgttggtcaggctggtgccgatgcgcaccgattgctcgatctcgcgcgtggcgtcgtagtagacccagttgccggccgcgccggccacggactccattgactccaccagcggcgtgccggcggcgaacatggtggccagcgtgcgggtccagcgcgcgatcacggccttgcggaacaggctgccgaagatcggcagcttcagcagcgcgcggtcggtggcgcgctgcaccttctccgatttcttcagcgcgcgcaggtagaaggagatgccggccaccggcgccccgatcaccaggtaccagtactggacaaagaagtccgagatggcgatcaccagcagcgtcggcgccggcaggttggcgccgaagctggagaacacgcccttgaacgccgggatcacgaacagcatcaggatcacggtcacggcaaaggccaccgtcagcaccgcgatcgggtagatcatcgccgacttgatctggcctttcagcgcgatggtcttttccatgtagagcgacaggcgctccagcagcgaatccaggataccgccctgttcgccggcatcgatcaggttgcagtacagcgtatcgaagtacttcggatggcgccggaatgccgcggccatgctgctgccggcctcgatgtcgaagcggatgtcggacagcagctgggtgaagttggggttcacgtggccacgcgcgatgatgtcgatcgattgcagcagcggaatgccggccttgagcatggtcgacagctgccgtgtgaagtaggcgatgtccttctcggtgatcttgcgcccgcgcgcggccttgcgcttcttcagcttgacgatggtcaggccctgcttgcgcagcgtggcggtgacctcggcctggttctcggcgcgcagctcgccggtgaaggtcttgcccttgcggtccttgccttcccactcaaagatgtactgggtgggtgccttgcgccccttccctgatttcgcccgtgacggtgccgccgtccgggcgcccgccgctggtgcacgcgtcgccatgatattgacccccgatgtaaatgacgcttgttctgcgtcttgtatttacgtttgtcctgcttccctaagtattcgtagtcgccagcacttcttcgagtgacgtgacgccctgcctcaccttcagcagccccgcttcgcgcaacgatagcacgccgtccttgcgcgcctgctcggcgatctgcaatgccgttccatgcgtcaggatgatctcctgcatggcctcggtgatcggcatgacctggtagatgccgcagcggcccttgtagccggtgccgttgcagcgctcgcagccgaccgggtggtaggcctgccagctgccgtccaggtcttgttcgcggaagcccgcctccagcagcgcctcgcgcgggatctcgccctcgcgcttgcaggtgcacagccgccgcgccagccgctgcgcggtgatcatcagtacgctcgaggcaatattgaaggccgccacgcccatgttcatcaaccgcgtcagcgtggtcggcgcgtcgttggtgtgcagcgtcgacaacaccaggtggccggtctgcgcggccttgatcgagatgtcggcggtttccaggtcgcggatttcgccgaccatgatgatgtccggatcctgccgcaggaacgaacgcagggccgcggcaaaggtcaggcccgccttgtcgttgacgttgacctggttgatgccgggcagctggatttcggccgggtcttccgcggtggagatattgatgtcgccctggttcagcaggttcaggaaggtgtacagcgacaccgtcttgccgctgccggtggggccggtcaccagcaccatgccataggggcgcttgatcacgtccagcagcagcgccttctgctcgggctcatagccgagctggtcgatgtcgagcttgtcggacgaagattccaggatccgcatcacgatcttctcgccgaacagcgtcggcagcgtcgacacgcggaaatccactgcccgctcgaccgtctccttggcgtccttgtccttgggcagggcaatcagcagcttcatgcggccgtcctgcggcacgcgcttttcagaaatatccaggcgcgacagcaccttgatgcgggtggcgatcttgtcgcggatatccagcggtgggcgcgcgacctcctgcagcaccccgtccacgcggaagcggacgcggtagaaagtctcgaacggctcgaagtgcaggtcggacgcgccgcgatggaaggcctcggtcagcagcttctgcaggaagcgcaccaccggggcgtcgtcgatattgtcggcggtggtgcggttgcgctggttgccggccgcggccaccggatcgtattcgatcatcttgcgctcggcctgcaccggcgagatgttcttcagcgtgcccagggcctcgccggcggagcgcacgtgcttcatcagcttgtcgtgctcgaccaccaccgcttcgaccggcagcttgtacttttccttgatcgcatccagcccggcctggttggacgggtcggacatcgccagcaccagccggttctcgcgccggcccagcggcagcagccggtgcgcgtggaattcacggttgccggccagtgccggcggcaccttgttcaggttgtactgggccaggtccagcagcggcagctggtatttgtccgcggcaaacagcgccaggtcgtgcgcgctcatggtgccgctgccgacgatctcgtcgatcagctgcgactgcttttcacgcgcggcctgctccagctgagcaagcagggcgggcgcgatacgccggctctgggccagggcaagaccgagtgtcatggcaggtgcgctgtgcggtgcggttaggcggtggcggatgccacgcaggcgggggcggacggacccacgtccccggatcggggcagtttgccgccggggtcactttttgtaaagccggcgcgggcgcggtgttggcgtttgcgcgacacgggcgcaaccctacttgcgcggggaagaagcggcgtttcaggcagcttccttgcgcgcgggacaggtgcccttttgagaggagtccctgtccccgcccatgtttgccttggccttttcccaacgggagacgccacgtcatttttgatccgatatagaatcaaaagtgcgtgcataacactgcgtgatgccaatttgcaggaagcccttcatgcagttcatcaagaaggcgcacaagccgctgcacctggcgatcgaggatgaagagagaaagggatgaccatcatgaccgcagaagacctgatgaaggccgtcagcaagatgcccgcgcaggagcgcatcaagtttttcacgccggtgggcgagcaggctttcaaggacgaggacttctcgcacgaggaagtctttggccacctcgcggaagcagatttcaccgccgcggaggcggccgaatacctcgaagtttcaattgccaccttccggcggctggtgcgcgacggcaagctcgcgccccatgcagtagtgggtcgtagccagctgttttccgcggccgacctggaggcattcaagcgtcagcgcaaggcgatcaagggatgagttgccggaggatcggggagggggggcagaaagacaaaaggccgaaccaactgacgttgattcggccttttaaatctggtcggggtgagaggattcgaacctccggcctctacgtcccgaacgtagcgctctaccaggctaagctacaccccgatttggtttgctggcaaacgtctgaccgtctgcagcaaagaacgtaagtttagcagcgttttttggggaatggaagagggcgaggaaaatcgccgttctgcccgcttccgctgccttccccgcggttgcgtcaggactgccgttgcaatgagaacgcgcagagctggatcagggtttccttcagttccgacggcgggaactgccgtgccgcctgttcggcggcttcagcctcgcgccgcgcggcttcgaaggtgacgtccagcgcgccactggcgtggatcgcggcaaacacggcatcgaaatgctcggtgccacctcgcacgatggcgtcgcgcgccaactggcgctgttcgggcgtgccgtgttccagcaggtgcagcaggggcagggtgggcttgccttcgcgcaggtcgtcgccggcgttcttgcccatctgctcggcgctggcagtgtagtccagcatgtcgtcgatcagctggaaggcggtgccgatgcggcggccgtattcagccgcggcttcttccatctgggcgtcggcgccggccagcacggcgccgagttgcgcggcggcctcgaacagcttggcggtcttgtagcggatcacctgcaggtagcgctcgacggtgacgtcggggtcgtgcatgttcagcagctgcaggacctcgccctcggcgatcacgttggtcgcgttggacaggatctccatgatgcgcatgctgccggcatcgaccatcatctggaacgcgcgcgaatagaggaagtcgcccaccagcacgctggcggcgttgccgaacacggcattggcggtatcgcgcccgcgccgcagctcggactcgtcgaccacgtcgtcgtgcagcagggtggcggtgtggatgaactccaccacggcggccagctcatggtggcggttgccgtcgtagcccatcgcgcgcgctgtcagcagcaggatcaccgggcgcaggcgcttgccgccggcaccgatgatgtattcgccgatctgctcgatcagggggacttcagaagacagccgctggcggataacagcatcgaccgcgcgcatgtctgcagcgaccggggcaagcaaggcagtggcggaaggctgggacaagatgatcaccgttacgcaaaaccggacgattatatgcgatgcgcgtggcgttccacgtatggcgcgcttctaaagattcgcgctcagggtatgcgctcagggtgttcgcaaggcgcgcaactataatgcagccatgaacaagcccgtgcctcgtcgccacctgcgccgcaccgccctttgggtggcgtttgcggcactggcgggattcctgctcgccgacctgacctgagccagggcgcggttgcattgtggcgatgccgccgcacacaggctatgtgcctgttttctttgcccttttcccggatctcatttataattcccggtttcctccggtagctgcgctcgctttgcgggttctgaccggcgggagataaccgggccgcattgagcccgcccaggcgccaggccgtgcaattgaccggccgcgcagggtgcgccagtgccggcatacggcgttttattcacatccgagaggttcgacaatgtacgcggtcgtaaaaaccggcggcaagcaatacaaggttgctgctggcgaaaaactgaaagtagaacagataccggcagacattggcgcagaaatcacgctcgaccaggtgctcgcagtgggcgccggcgaccaaatcaagtttggtacgccgctggttagcggggcttccgtcaaggctaccgttatctcccaaggtcgtcacgacaaagtgaagatcttcaagatgcgccgtcgcaagcactaccagaagcgtcagggccatcgtcagaattacaccgaactgcgcatcgaagcgatcgttgcctgatcgatcgagcgtaaccaggtaaagcgacaggagtaagacatggcacagaaaaaaggcggcggttccacgcggaacggccgtgattccgaatcgaagcgtctgggcgtgaaggtgtttggtggccaggccatcaacgccggcggcatcatcatccgccaacgcggtacccgcgtgcatgctggcgacaacgtcggcgtgggcaaggaccacacgctctttgccctggtggacggccacgtgcagttcgccgtcaagggccctgccaagaagcagcaagtcagcgtcgttccggcggcctgataacagcctttgcaggatgaaggccccgcaacgcttgcggggccttttcttttctggcgacaatgtcagttcgccagcccggtcggaggcttccagccgctgatccgccgatccatcacggaaacccatcatcatgaagttcatagacgaagcccgaatcgaagccatcgccggcaacggcggcaatggcagcgcctcgttccggcgcgagaagtttgtgcccttcggcggcccggatggtggcgacggcggccgcggcggcagcgtgttcgccgtggcggaccgcaatatcaatacgctgatcgacttccgctacgccaggaagcacgttgcccgcaacggcgagaacggccgcggctccgactgctacggcgcggcgggtgaggacatcacgctgcgcatgccggtgggcacgctgatcaccgacatggacaccggcgaagtcatcgccgacctgaccgagcacggccagcgcgtgtgcctggccgaaggcggcatgggcggctggggcaacctgcatttcaagtccagtaccaaccgcgcgccgcgccagcaggtggacggcaagccgggcgagcgccgcatgctcaagctcgagctcaaggtgctggccgacgtcggcctgctgggcatgcccaacgccggcaagtcgacctttatctcgcatatctccaacgcgcgcccgaaggtggcggactatccgttcactaccctgcacccgaacctgggcgtggtgcgcgtggaccacgagcaatcgttcgtggtcgccgacattcccggcctgatcgaaggcgccgccgaaggcgcgggcctgggtcaccagttcctgcgccacctgcagcgcaccggcctgctgctgcatattgtcgacctggcgccgttcgacgaggcagtcgacccggtggccgaggccaaggccatcgtcaacgagctgaagaagtacgacgaaaccctgtacgacaagccgcgctggctggtgctgaacaagctcgacgtggttcccgaggacgagcgcgcggcccgcgtgaaggatttcatcaagcgctacaagtggaaggggccggtgttccagatttcggcgctgaccggcgaaggctgccgcgagctgatctacgcgatcaaggaccacctgcaggcgatcaaggccgaagaagccgcggcgctggccgagccggacatccggctggacgagcgcctgcacaacgtcgaccaggggcagggcgaggcataagccggggccgccgctggcgccccaccacagaagaatacccacggacaattcgggcgcggcgcccgccgccggctgcccgggagacaggattcccgtcatgcaatcggtcatcgcgcaggcaaagcgcatcgtcgtcaaagtcggctccagcctggtcaccaacgacggcaaggggctggaccacgacgccatcgcccgctgggcggcccagatcgccaagctgcgcgtggccggcaaggaagtggtgctggtcagctccggcgccatcgccgaaggcatgcagcgcctgggctgggtgcgccgcccgaaggaaatccatgagctgcaggccgccgccgccgtcggccagatgggcctggcgcaggtctatgaaagccagttcggccgctacggcatccgcaccgcgcaggtgctgctgacccacgccgacctggccgaccgcgaacgctacctcaacgcccgctcgaccctgctcacgctgctgtccctgggcgtggtgccgatcatcaacgagaacgacaccgtggtcaccgacgaaatcaagttcggcgacaacgacacgctgggcgcgctggtgaccaacctgatcgaaggcgacgcgctggtgatcctgaccgaccagcgcggcctgtacaccgccgacccgcgcaaggacccggccgcgcagttcgtggacgaggccctggccggcacccccgagctggaggccatggccggcggcgccggcacgtcgatcgggcgcggcggcatgctgaccaagatcctggcggccaagcgcgcagccaagtccggcgcccataccaccatcgcctccgggcgcgaggccaacgtgctggagcgcctggccgcgggcgaggccatcggcacccagctgctggcgccgaccgggcggctcacggcgcgcaagcaatggatggccgaccacctgcagctgcgcggccgggtcgtgatcgacaacggcgcggtcgagaagctcaccagcggcggcaagtcgctgttgccgatcggcgtgacggaagtgcagggcgagttcgcccgcggcgaggtgatcgcgtgcgtcgacgcgcagggcaaggaggtggcgcgcggcatcaccaactattccagcgccgaggcgcggctgatcgcgcgcaagccctcatccgagatcgagtccgtgctggggcacctgaacgagcccgaactgatccatcgcgacaacctggtgctggtctgacgggcgtacaggccgggcgcaaacaaaaacggcggggctgccaggcagtcccgccgtttttttatgtcgacgctgcgtgcttcagcgcttgcgcggcgctcgcgattgcaggtcgcgcaccatggcgtcggcggtgccggccacggtacggccctcgcagaagaaatcgatcgccagcgtggcggcataggcattgcgcacgccagtctccatgcggtgccaggtctcgccgtagtcgctgctgttgggcacccactcggtggcgcccttgggcagcgtggcgtagagcttgcgctcgaacgcatcgcagcgcaggccttcgaaggtcacgttgcgcgcgccgctctggctggtggtgacgaccgtgtagcgcaccacgttgtccttgccgaccgagaccgacttgccgtccaccgcgaatgacagcgagccggtgcccgacaccgagaacgggatcaggttggcgtcctgaggcggtgccggcagcatcgccttggcctcatcaaaggtcttgggcgcgaacgggttgagccaggtgctttcttcctccgccatctccttgccggtggtcttgcagccggccagcgcaaggctggccgcggcaatcagcatgccggcagcggtcaggccgcggcggcggcccaggccggtgaaactagtcatcagtgctccgtgaggtggaaaccggcgttgccggtgaatcgtgctcggtcgcgtgcgcggcctcggcattgcagtcggcgtcggcctgctgcgcctgctgggcgcggctgagcgcctggctgcgcggcccgccatgccggccatgcatgccgtgggggccgtgcgtgccatagggactcagcggcacacgcgcgtgccggttcaggaagcgtgacaactccgtcagcgccagctggtagacatcgcgcttgaactcgatcaccgcctccagcggcacccagtaatgactccaacgccaggcgtcgaattcagggtgctcggtggcacgcagatggatatcacagtccctgccggccatgcgcagcaggaaccagatttgtttctggcccttgtagtggccgcggatctcgcggcggatgaacttgtccggcacctcgtaacgcagccagtcgcgcgtgcgaccgacgatcctgacgtgctccggaagcaggccgatttcctcatgcagttcgcggtacatggcctgttcaggcgtttcgccgtacttgatgccaccttgcgggaactgccaggagtgttcgccgattcgcttgccccagaaaacctcgtttcgtgcgttgaggaggatgatgccgacgttcgggcgaaagccttcacgatcgagcatgactgcacctcgaatcctttagaattacgctgattataaaggaagcgcgcagccgggcccggaccgggggatgctggttttccccgagcggaagggcagtttcaggcgcgtgcccacaattcagtgccgccggcccccggattttgccgggacgggttttcccgagcccggcggcccagagagaaattacggatgaaagcctcgcaattcttcatttccaccctcaaggaagcgcccgccgacgcggaaatcgtttcgcacaagctgatgatgcgcgccggcatgatcaagaagctgggcgccggcatctacaactacatgccgatcgggctgcgcgtgatccgcaaggtggagaacatcgtgcgcgaggaaatgaaccgcgccggcgcggtggagctgtccatgccggtgatccagccggccgagctgtggcaggaaaccggccgctgggacaagatgggccccgagctgctgcgcctgaaggaccgccatgagcgcgacttcgcggtccagccgacctcggaagaggtggtgaccgacatcgcccgctcggaaatccgcagctacaagcagctgccggtcaatttctaccagatccagaccaagttccgcgacgagcgccggccgcgcttcggcatcatgcgcgggcgcgagttcaccatgaaggatgcctattccttcgaccgcgacacggacggcctgcgcaagtcgtacgagaacatgtacgacgcctacgtgcgcatcttccgccgctttggcctggaattccgcgccgtggcggccgacaacggcgccatcggcggctcgggctcgcatgagttccatgtgatcgccgacaccggcgaagacgccatcgtctactgcccgacctcggactacgccgccaacatggaggccgccgaggcgctgcccctgctggccagccgcgccgcgccggccgaagacctggtcaagaccgccaccccggaaaaggccaagtgcgagcacgtggccgagttcctgggcatcccgctgcagcgcaccgtcaagtcgatcgtgctggccaaggacaccgaggccggcgccgagatctggctgctgctgatccgcggcgaccatgagctgaacgaggtcaaggcgtcaaaggtgccgggcctggccgacttccgctttgccaccgagaacgagatcgtcgacgccttcggctcgccgccgggctacctgggcccgatcggcgcgaagaagccggtcaaggtggtggccgaccgcaccgtcgccaacatgagcgatttcgtctgcggcgccaactaccgcgactaccactacaccggcgtcaactggggccgcgacctgcccgagccggtcgtggccgacctgcgcaacgtggtcgccggcgacgcctcgccggacggccagggcacgctggaaatctgccgcggcatcgaggtgggccacgtgttcatgctgggcacgcgttactcggaatcgatgaacgccacctttctggacgagaacggcaagacccagccgatgcagatgggctgctacggcatcggcgtcacccgtatcctgggcgcggcgatcgagcagaacttcgatgagcgcggcatcatctggccggccgcgatcgcgccgttcgcggtggtgatctgcccggtgggctacgaccgctccgaagccgtcaaggccgaggccgaccgcatccatgccgagctgctggccgccggcgtggacgtcatcctggacgaccgcggcgagcgcccgggcgtgatgtttgccgactgggagctgatcggcgtgccgcaccgcgtggtggtgggcgaccgcggcctgaaggaaggcaaggtcgagtaccagggccggcgcgacgcgcaggccaccgccgtcagcgtggccgacgtggtcggccacgtgcgcagccagctggcgaactgagccccatgcgcgccgcccgcggcatgaccggtgccgcccgccgctgcgcgggcgggctgctgctggccgtcgcggccatggcagcccacgccggcgcgcagaaggaagaagacctcgccgattccgtgcgcggcgcgctggccgccgccattgccgatgaccggcccacgcggccggtattcgcgtccggcggcgagcgcctggcctacctgaaatggctgggcgagatgtccgcccgcctggcctcgcgcatccccgagccgcaggtgcgcgtggaactgatcgaggtggcctactacgaggccaagcgcgccgggctggagcccgcgctggtgctgggcctggtccaggtcgagagcaacttccgcaagtacgcgatcagctcggccggtgcgcgcgggctgatgcaggtgatgccgttctgggtgcgcgccatcggcgacagcgacccgcgcaagctgtttcacctgcagagcaacctgcgttacggctgcaccatcctgcgctactacctggaccgcgagcagggcgacctgtacctggcgctgggccgctacaacggcagccgcggccgccccgaatatccgaacgcggtgctggcggcgtggaagcgctggcagtattccgaagccacggtcaccgtggccggcgagcccgaggtcgcgccgtcgcgcccgcgcgcaccggtgtccgagccgcctgcccgcaacccgttctcgtcgcagcgcgtcgccgccaatccgtcatgatccgcgaagcatccgttgccggcggcaagaccggctacaccgaatcctcgcccgaccttgaacaatggctggcccggcatatcgcccagggctttgccgccgatgcgctggtgttgtcgatgctgcgctcgggctatgacgacgcctttgcgcgccaggccgtggccgcggcatttgcacaagatgcctatggtgccgcgccggcccggcctgcgccggcgcgctccgcagctgcagccggcacgcccgcggtctacgcggccgatggcggggaccgccaggtcccgatcctgttccggctggcgtcgccacaggtccaattgttccagcagctgctgaccgacgacgagtgcgatgccctggtggcgctgtcgcgcggccgcctggcgcgctcgccggtggtcaacccggacaccggcgacgagaacctgatcgatgcccgcaccagcatgggcgcgatgttccaggtggccgagcaccccctgatcacgcgcatcgaggcccgcatcgccgccgtcaccggcgtgccggccgagcacggcgaaggcctgcagatcctcaactacaagcccggcggcgagtaccagccgcacttcgactacttcaatccgcagcgccccggcgaggcgcgccagctgtccgtcggcgggcagcgcatcgccaccctggtgatctacctgaacacgcccgaggcgggcggcgccaccgcgttcccgcgcgtggggctggaggtggcgccggtcaagggcaatgcggtgtacttcagctacctgctgcccgacggcgcgctggacgagcgcaccctgcacgcggggctgccggtggccttcggcgagaagtggatcgccaccaagtggctgcgcgaacggccgtaccgcagcgacgcctgattgtgtttcgcaggagcgcactgcgcggtactgatcccgtgcccggcgccgtatcggcattaattccaaaaattgtaccggtactgtaccgctaactgaccgtagactgatttccctgaacgccctggagtcagtcatggaagtgtcccaactcgccgccggaaccggtgtcttcgccgcgtttgccggctttgcgctggtgtcgtcgatcacccccggtcccaacaacacgatgctgctcgcctcgggcgtgaatttcggcttcgtgcgcacggtgccgcacctgctcggcgtcagcattggctttgcgctgatggtggggctggtcgggctggggctgggatcgatgttccacgccttcccgtggacctggcaggtgctgcgcgtggtggcgacggtctacttgatatggctggcgtggaagctggccaccgccggcggcgtgcaggaccagcaggtcaagcggccgatgggcttctgggcggcggcggcgttccagtgggtcaatcccaaggcgtgggtgatggcggtgggtgcgtgcagcacctatgtgctgcacggcaacctgtggctcaacgtgctgctgctggcggggatcttcggggtggtgaacctgcccagcgtggcgatgtgggcactgtgcggctctgcgctgcggcgctggctggcgcgtccgcgggtgctgcgcgccttcaatatcggcatggccgtgctgctgctggcctcgctgtggccgatcctgggcgcctgaggatggcgccggggcaggcacccgggcgggtgcctgtattaactgatcaaaccagcgcgcggatcgagtccaggttgcgccagtagcccttggcatccatgccgcacccaaacacatagcggtccggcacggcaaagccgcagaagtccggatgcatgggcttgatcttggtcagcgtcttctcgcacagcaccgcggcgtggaattccttggcgcccatgtccatgatgcgctcgcggatcgcggccatggtctcgccttcatccaggatgtcgtccagcaccagcaccacgcggtccttgaccgactcgcgcggggccacgcgccactgcatctcgccgcccacggtcttgttgttgtagcgcgagaggtggatgtagtcgaactccagcgggaaggccagcttgggcagcagcatgccggtgaagaccaccgcgccgcccatcaccgacagcaccagcgggaaggcatcgcccatcttggcggtgatttccgcggccatgcggtccagcgacgcctggacttccgcggcggagacgatttcctcggagttggcccacagctcgcgggcctgtacggcactcatcatgatgtctttcctgttcttttgcggggggaggcaagtcggggtgcgacggacggattctagcggttgaagaggcccttcatgccgcccttcatcgcgcccatctggcgcatcatcttcatcatgccgccgcccttgagctttttcatcatggactgcatctggtcgaactggttgagcaggcggttcacttcctgcaccggcacgccggcgcccgcggcaatgcggcgcttgcggctggccttgatcagctcgggcttggcgcgctcggtgggcgtcatgctgttgatgatgccttccatgcgggccacctgcttctcggcctggtccatgttggcgccctgcgcctgctgggcgaactgcgccggcagcttgtcgaccaggctgcccaggccgcccatcttcttcatctggccgatctgggccttgaagtcttccaggtcgaagtcaccggtcttcttgatcttcttggccagcttctcggccgcttccatgtccacgccgcgctgggcttcctcgaccagcgcgaggatgtcgcccatgcccaggatgcgctgggccatgcggtcggggtagaagggctccaggccgtccagcttttcgccgacgccgacaaacttgatcgggcggccggtgatatggcgcaccgacagcgccgcgccgccgcgcgcgtcgccgtccagcttggtcagcaccacgcctgtcagcggcagggtgtcgttgaaggccttggcggtgttgaccgcgtcctggcccagcatggcgtcgaccacgaacagggtttcggcgggcttcagctcggcgtgcagggcggcgatttcctgcatcatcagctcgtcgataccgagccggccggccgtgtcgacgatcagcacgtcgtggtagtgcttgcgcgcccagtccaccgccgcgcgggcgatgtccgccggcttctggtccggctgcgacgggaagaagtcagcgccgacttgctcggaaacggtcttgagctgggcgatagcggcggggcggtagacgtcgcacgagaccgtcagcaccttcttctttttgttttccttgagccacttggccagcttgcccacggtggtggtcttgccggcgccctgcaggccggccatcaggatgatggcgggcggctgcacggccaggttcagctcggcttccttgttgttgccgctggccgcgtcggcgccgccgatcacggcggtcagctcgcgctggaccacgccgaccagggcctggcccggggtgaggctgctgacaacctcctcgcccatggccttttccttcacgcgggcaacgaattcgcgcacgaccggcagcgccacgtcagcttcgagcatggcaaggcgcacttcgcgcagcatctcggcggtgttggcctcggtcaggcgcgcctcgccgcgcatggtcttgaccacacgcgccaggcgttgagtgagattgtccagcatggcaggaatcgggggagaagtcggagcagggctcggggctgaaatcggaggcagtcttgcacacggggcgggcctggaacaccggttacaccggttcaagcgggccgccaccgtccgtgggcactaaggtaaactgcgtaaatggtcattgtactgtatgccctgacggcacttctctattgcggcctggcctttcacggctgggccacgcgccacccacgccttgccaccgctgccggcccggcagggggggcgacctcggccgtgctggtggccggcggcggccccatccccccggcgggcggcgcgcacggcgaagggcgcccggcctggtggcacgtgctgatgctggcggcgctggccagccacggcatgctgctgcatgaaaccatcttcccggccgagcgcatgatgttcggctttgccttcgcactgtcggccatgctgtggctgggcgtgggcatctactggatcgaaagcttcttcttctcgctggcgggcctgggcctgatcgtgatcccggtggcgctggtggccagcctgatgccgctggccttccccggctcgcagatcctgggctacgcggcgcggccgctgttcaagctgcatttcatcatcgccaacgtggcctacgggctgttcacgctggcggcgttccacgccttcctgatgctgctggccgaacggcgcctgcatggcttccggcacgcgccggcgcggccgccggagcagcaacccagcgaatggctgggccgctggctggacctgctgccgccgctgctgacgctggagaagctgctgttccggctgattggcgccggctttgtgctgctgacgctgaccatcggctcgggcctgctgttctctgaagacctgttcggccgcgccttccggctggaccacaagacggtgttcgcgctgatctcgtgggccatgttcggcggcatcctggccgggcgcatcttccgcggctggcgcggcaaggtggcgctgcgctgggtcatcgcctcgttcggcatcctgctgctggcctatgtcggcagccgtttcgtgattgaagtcgtcctgcatcgcctctgattccccatggcacgtatcctgatcctgctggccgtggtgctgggcgtcatctggtggctgcgcgcccgcgccgaggcgcggctggctgaacaccgcgcacgccaggcccgcgaggccagcgagcgcactgccgccgccggcccggccgacgccaccgccgaacccatggtccagtgcgcccagtgcggcgtgcacctgccgcagggcgaggccattgcctggcgcggcctgcactactgccgccgcagccacctgcctgacgaaagccgggccgagggcagcgacagcagcagcggcccccgcccatgacagagccggcgtcgtcgggctggcagcggctgaacgcctggcgcggcctggcccagctgtggcgccagcccgaaccgcctgactttcactggcgcctgctgcgctatttctgctggacccgtgtggccgtgggcctgctgctggtcggttttgcgctgatgcggcgcggcgagccggcctccgtcaccgccatcacgaatgcgatcccgcccgtgccgttcgacctcgggggcctgggcggcatcgagcacgcggcggccatgaccatcgccgtgccctatcttggcattgccgtggcgatgctggccggcacgctgtggcgccggcacttccatctgcgcgtgcgggtgcaggtgctggccgacctggccctgctggcgctggtcttcagcgtgctggggcggggcgggcaggccgagggcctggccatgatcttcctgctgcccgcgctggaagccggcgcactgaccagcctgctgttcgcgctgtttgccgcgtcgatctccgcgctggtggtgatgagcgggcccttcatgcacaccatcctgctgcgccaggccgatgccgggctgctgggctcgggcctgttcggcctggtgttcatgatcgcggcgctgctgatgtatatgctggccaaccgccagatcgcgcaggagcgcctggcgctggcgcgcgagcaggagctgcgcctgcagcagctggtcaaccggctcatggtcaacgacatgcaggacggcgtgatgctggtgcgcgccaacggcgcggtggtggccgccaaccccgcggcggtggtgctgctgggcgtgcagccgcatgagcgcatctactcgcgccggctgggtggtgcggcaggtcagggcggagaagcagtgctgttcgacctgcgccgcatcccgcgcctgcagccgctgatggagatgctgcgcgactggctgcacagcaaggacgacgtgccgcgcatcctgcagctgctgccgatggcgtccggcaccgcgctggccgacggcaccatgcagcacacccggctgcggctgcgctttgtgctgccggggctggcaggattgcgctcgaccatggcgcatggccgcaccgtgccggccacgctggataccgccgcctggagcgaactgtcgcccgaagccgccggccgcctgcgcctggccatcgcccagaacgaggccatggcctggtcgcaggaggatgaggccctgctgcgcaacgagatgcgcgacaccgtgctggtccatatcgaaagctgggaacgcatcgccgagcaggtgcagcaggaaaagctggccgccatgggccggctggtggccagcatcgcgcaccagatccgcaacccgctggcagcaatcagccaggccagcgagctgctgggagactccggccggcgcgaccctgccgcgcaagaccatggcggcgccgatgtcgatatcgacgcccgcctgctgcgcatcatcaacgacaacgtgcgccggctggaccaggtggtgtcagacgtgctgcagatgtcgcgccgcccgcgcaccggccgcagcaccgtgcacctggcgcaggcgctgcccgagatcgtcgagcgctggcgcgccgaaatgcgctcgcgccgcccgcgcgccggcgagacccgcccggcgggccgggccgacatcaacgccaatgccatccggctgaccgtggacgtggcccagccggtggtgttcgacgcctcgcagctgcagcaggtgctgggcaacctgctggacaacgcctggcgctactgcagccggctgccgggatcgatccggctgctggcgcatgcgctggaccagcaccatgccgagctgatcgtctggaacgacggcgccgaagtcgcgcgcgagcaccagcgcagcctgttcgaaccgttcttcaccagcaacgcccagggcaccgggctgggcctgttcatggcgcgcgagctgtgcggcgccaatgacgcccaggtgcgctacggcgccatcgccttgccggcgctgttggagcgcactggcatgctggccgccgccgcgcgcgatacactgccggccaaggctttcgtgctgacgctgcgcatcgagagtgccgatgcggccgccgcctgacctgtcccaacccagccaccaccccatgccaccccgaatgtcccgagcgcccgatcccatcctggtcatcgacgacgaggccgacctgcgcgagctgctggacatctcgatccgccgcatgggccatgacgtggtgctggccggctcgctcgccgaggcgcgcgagaagctggcgcagcgccgctacagcctggtgctgaccgacatgcgcctgggcgacggcctgggcatcgagatcgtgcgccagctgtcggccgcgccggaacgcatcccggtggcggtcatcaccgcctacggcagcgccgacaacgccgtggaagcactcaaggccggcgccttcgactacatcgccaagccggtatcgctggagcagctgcgcagcctggtgctgaacgcgctgggccgccagcaacgcgacagcaccgatgccgaagccgccgcggccgagcaggccgccgaccgcgccgccgccctgctgcccggccattccgccgccatgctggaggtgcgccgttcgctgtcgcggctggcgcgcagcatggcgccggtggtgatcagcggcgaatccggcagcggcaaggagcgcgccgcgcgcgccatccacgcgaccagcggccgggccgcgcatccgtttatcgccgtcaactgcggcgccatccccgagaacctgatggagtccgagttcttcggccatgtcaaaggcgccttcaccggtgccgacggggagcgcggcggcttcttccaggccgccaacggcggcacgctgctgctcgacgaggtggccgacctgccgctgccgatgcaggtcaagctgctgcgcgcgctgcaggagcgccgcgtgcgcaagatcggcgccagccgcgaagacgccgtcgacgtgcgcgtgatgtgcgccagccacaaggacctggcggcgatggtgtcggccgggcagttccggcaggacttgtactaccgcctgaacgtgctggcgctgcgcatgcccacgctgcgcgagcgcggtgaagacatcccggtgctggcgcgcgccatcctggaccacctggcggtgcgctacggcgacccgcgccccaagcggctgtcgccggcggcgctgcaacggctggtggcctatccgttccccggcaacgtgcgcgagctggagaacctgctggagcgcgcctacgcctttgccgagagcgaagagatcgagctggccgacctgggcccgctggacgccggcgccgagcgcgccgggctgatgcatgcccccgcgccggcgatggcgcccaccaactattccgccccctggggcgccgcaggcatgtgggcgccggtgccgccggccgccgcgcccgcgccggccccggcagagccgccgcccgtggtgccggccccggccagcgcgcccgaacccgagcccgccggcgatcccgccgaacgcgcctgccgcggcatcgtcttcccgatcgacctgcaagccaggctggaagccgtggagcgcgagctgatcctgcaggcgctggcgcagaccaacttcaaccgcaccgcggccgcgccgctgctgggcctgaacctgcgccagctgcgctaccgtatccagcaactgggcatccgcgaggccatggacgccgccgaacgcagcaccgtggaaggcgagggcacgtcatgagcaagcccgagcaccgctatctgccagaggccgacggctgggtccccgccgcgcgccgcgtgccgtcaccaaactttgacgagcgcccggccggcatgccggtggacctggtggtgctgcacaacatcagcctgccgcccggccagttcggcagcggcgacatcgaggccttcttccagaaccggctcgatcccaacaagcacccgtactttgccaccatccaccaggtgcaggtgtccgcgcacttcctggtcacgcgcgagggggagctggtgcagtttgtcccgtgcacgcagcgggcctggcacgccggacagtccgacttcttcggccgcgcccgctgcaacgatttctccatcggcatcgagatcgagggctgcgacgacctgccgttcaccctggcccagtacgacaccgtggccgcgctggtgccggcgctgctggccgcctacccggtgcgcgcgattgctgggcacagcgacatcgccccggggcgcaagaccgatcccggcccgcatttcgactgggcgcgcttcgccaggcaggcaggcgtggcgccgggcatgttgccctaccagtgccctggcgcggctggccaggtgacgaatccttaacctcattccccatccccgtgcgccccgttccggcgcacatgccctacctcggggtggggctatcgcaacctcgcaacaatcaaaaaaatttttgtgaaatgtgcagttgcgaacggtctggcgaaaacccttgcgagtattaggcttgcgggcatgtggcgctgccgcatcggcgcaaccgcccccgaaatagcgcttgtcaagactggtcattcggattcgtttcactatacttagcccagtttcacgcgtcacacactatatctagtagtcaaaccggggagccggccccaagggtgagtcagggatcacgaagttcgtgcatcgtctcgaaaccgcccgctaaggccagcgaatcacaagagtccctggcgaaatgttcacgtaaaggcagtctgtccgcccccgacctcacgccgggagggacgttcttttcgccgcatttcgccagggactcttttgtctcttatttccagggtaaaaacaggagttctcatgcaaacggcccagaacgaaatcaccacgggtggcgccgccgccggtattgcaccgaccgcgcagcagacccccgccaacgccgccaatacgaactacccggatcacaagatcattcgacgcaacggcgccgtggtggctttcgagccgtccaagatcgccgttgccatgaccaaggccttcctcgccgtgaacggcgggcagggcgccgcgtccgcgcgtgtgcgcgagatcgtcgagcaactgactgacaacgtcgtgcgcgcactggtgcgcagccgccccaacggcggcgccatccatatcgaagacgtgcaggaccacgtggaactggcgctgatgcgctcgggcgagcatgaagtggcccgcgcctacgtgctgtaccgcgagaagcgcaaggacgagcgcgcccaggccaacgcccaggccgtggcccgcgtgcaggaaggcggcatctcggtcaacgtgaccgatggcggcgtcacccacgtgctggacatcgccgcgctgcatgacctgatcgacaacgcctgcagcggccttggcaacgcagtgagcgccgagccgatcctgaaggaaaccctgaagaacctgtacgacggcgtgccgatgacgcaggtgtacgactccgccatcctggccgcgcgtaccctgatcgaaaaggacccggactatagccaggtcaccgcccgtatcctgctgcacacgatccgcaaggaaatcctgggcaccgaagtgacgcaggccgaaatgagcacgcgttacgccgagtacttccccaagttcatcgcccgcggcatcgaagccgagctgctggacgagcaactggccaccttcgacctggcccgcctgggcgccgcgctggacgccggccgcgacttccagttcaactacctgggcctgcagaccctgtacgaccgctacttcctgcatatcgatgaaacccgcatcgaaatgccgcaggccttcttcatgcgcgtggccatgggcctggcgctgaacgagaaggaccgtgaagcgcgcgccatcgagttctaccagctgctgtcgtcgttcgacttcatgtcgtccacgccgaccctgttcaactccggcacccgccgctcgcagctgtcgtcgtgctacctgaccaccgtctccgacgacctggaaggcatctacgaagcgctgaaggaaaacgcgctgctgtccaagttcgccggcggcctgggcaatgactggaccaacgtgcgcgcgctcggctcgcacatcaagggcaccaacggcaagtcgcaaggcgtggtcccgttcctgaaggtggtgaacgacaccgccgtcgccgtgaaccagggcggcaagcgcaagggcgccgtctgcgcctacctggaaacgtggcacctggacatcgaagaattcctggaactgcgcaagaacaccggcgacgaccgccgccgcacccacgacatgaacacggccaactggatcccggacctgttcatgaagcgcgtgatggaaggcggcgaatggaccctgttctcgcccgccacctgcccggacctgcacgacaaggtcggcaaggaattcgagaaggcctacctgggctacgaagccaaggccgccagcggcgaactgaagctgttcaagaagctgccggcgctgcaactgtggcgcaagatgctgggcatgctgttcgagaccggccacccgtggatcaccttcaaggatccgtgcaacatccgcagcccgcagcagcacgtgggcgtggtgcacagctccaacctgtgcacggaaatcacgctcaacaccaatgagagcgagatcgccgtctgcaacctgggctcggtcaacctggtcgcacacatggccaagcaggccgacggcacctacgcgctggatcacgccaagctgcagaagaccgtgcgcactgccatgcgcatgctcgacaacgtgatcgacatcaactactacgccgtggacaaggcgcgcaattccaacctgcgccaccgtccggtcggcatgggcatcatgggcttccaggactgcctgcacgtgctgcgcacgccgtattccagcgatgccgccgtcaagtttgccgatacctcgatggaagcggtgtgctactacgcctaccacgcttcgaccgagctggccgaagagcgcggccgctacagcagctatgaaggttcgctgtgggaccgtggcatcctgccgcaagactcgctcaagctgctggccgaagagcgcggcggctacctggatgtcgacatgtccgccaccatggactgggacgcactgcgcgcccgcatcaagcagcacggcatgcgcaactcgaactgcatcgcgatcgcgccgaccgccacgatctcgaacatcatcggcgtgtccgcctgcatcgagccgacgttccagaacctgtacgtcaagtccaacctgtcgggcgagttcaccgtggtcaatgactacctggtgcgcgacctgaaggaacgcggcctgtgggacgaagtgatggttgccgacctgaagtacttcgacggctcgctgtcgcgcatcgaccgcattccgcaagacctgcgcgacatctacgccaccgcgttcgaagtcgagccgacctggctggtggaagccgccagccgccgccagaagtggatcgaccaggcccagtcgctgaacatctacatggccggcgcgtcgggcaagaagctggacgacacctacaagctggcatgggtgcgcggcctgaagaccacgtactacctgcgcacgatggctgcgacccacgtggagaagtccaccgtgtcgcgcggctcgctgaacgcagtgtcgtcgggcagcgacagcggctccgccctggacgcagccgccgcatcggccccggccatgccggaagccgaaggcgcggtctgcacgatgcgccccggtgatcctggctttgaagagtgcgaggcttgccaataagttctgaggcggttgtttaaggaggtgttgttatgttcaagctcaagaagttggaactgccaaagccaccaaagccgccaaagccgcccgatcggatgcagaacatgcaaacgttgcgcccactgggcgcaacgaaatgggtccgagcacactggcggtgggactatggaacccgcaaatgggaatgggtgttaggccactggagcaagtaacacccaactaagtaatctctgcgctcgccaagtgcgagcgcagcctcggagaagatcaatgctgagctgggacgacgacgttcaagccaccccgcaggccgcaccgcagcctgccctgcaacccgctgctgttgccgccaccgccgaccaacaaggcgttctgccgccggccgccacgcagcccggcatcctgggcgacaaccccaacgccgccgccgcgcaaagcaaccgccgcgtcaacgccgccgacaagcgcgtgatcaacggctcgaccgacgtcaaccagctggtgccgttcaagtacaagtgggcgtgggaaaaatacctggccggctgcgccaaccactggatgccgcaggaaatcaacatgtcccgcgacatcgccctgtggaaagaccccaacggcctgaccgaagacgagcgccgcatcatcaagcgcaacctcggcttcttcgtcaccgccgactcgctggccgccaacaacatcgtgctgggcacctaccgccagatcaccgcgccggaatgccgccagtacctgctgcgccaggcctttgaagaggccatccacacgcacgcctaccagtacatcgttgaatcgctgggcctgaacgaagccgagatcttcaacgcgtaccacgaagtgcagtcgatccgcgacaaggacgagttcctgatcccgtttatcgacacgctcaccgacccgtcgttcaagaccggcacgccggagaacgaccagaagctgctgaagtcgctgatcgtgttcgcctgcatcatggaagggctgttcttctatgtgggcttcacgcagatcctggcgatggggcggcagaacaagatgactggggctgcggagcagtatcagtacatcctgcgggatgagtcgctgcactgcaattttggtatcgacctgatcaatcagatcaagctggagaatccgcatctttggacggcggagtttaaggctgagattactgagctgttcaagaaggctgttgacctggagtatcgctacgctgaggacacgatgccgcgtggggtgctgggtttgaatgcgccgatgttcaagtcttacctgcgcttcatctgcaatcgtcggtgccagcagattgggttggatcagttgttcccgaatgaggagaatccgttcccgtggatgagcgagatgatcgatctgaagaaggagcggaacttctttgagacgcgcgttattgagtatcagacgggtggggcgttgagctgggattgagagtgatgaagcctcattcttaagcgttgaaagaatgggagccaataggctcccattcttctttcggatttccaatttgattgccgctattcgaggaatgaccgaattggtttcgcggaaagcgggtccgcgtgaaaatccaggaatagggccggcgctcggcgcatgttgaatagcatcgaggactgtttgtgtcgtggcagggggctggcgagagcccttctagatcattctgatctccgctaagaagatagaattctagcgtgaggacggttagcgtctttgggacttccgttgtgctggcctcctgctttagccgagacgagcccagcctaccgaaaggctgcttccgaattgctggtcgtagggctaagaagatgaaaggcgcgctctagtaaacgtttcatttccgcgggacgccgaccaggaggcggacggaggccttgccaacggcaaagagtatgatactttactggacattggtttaagagagataaaagtgacagcagccaagaaggtaatcccaagaaaaaggactacgacgccggtatcgcgaaggattagcgagtcgaactcgaaccggcttcgcttttccgcctcgctcattcagcagggcgataagcagttctatagcgtcaccatgcccaccgatatcttggcggcgcattgctttgtcaccactcgacatgaagacgtacagaacgggtttcagcgggttcttgataagaagcgtgcagaggatatcgctcgctatatcgatagcggcgaaggcaccatccctggctcgattattctgtcggcacaagaagatgcggacctcaaagtgctccaaggtaagacgctcgaattcagcgcagttccacgcgcatttcttgtcctagacgggcagcatcgcgtttacggttttcgaatggcaaccacggcattccgagtgcctgttgtgatttatagtggtctgactccggttgaggaggcccgactgttcattgacataaatacaaagcaacgccaggtgccgaatgagctattgcttgacatcaagcaactagcccaaagaaaagaccaaagggacacactgctgcggcaaacttttgatcttttttcgtcggactcagcaagcgtcatgtttgggctcatgagcccttcctcccgccagcataataagatctcgcgggtaacgtttagccttgccatgaagcctgcactcgcagttttcaacgcgcctaccccgctgagcgtatttcagatcactaatgcctatcttgcagcattcaaggatgttcttgataaggcaagggttgacgcctcgcttactgcgcccacgacatttagagcggtgtttgacatttttcctgaagtggccagaatttctgccgctcagcatgggaagaacttcagcaaacagaagttcgctgcaattatcaaccccattggcgacctgctgactcgttccaaatacgagaaggcgtcggctagcgtgaagactctcggcgaactgttcagtagcttgatcaagaaggacttcagtatctgagtcatggcactggatgacgcactaagactgagttggattggcgggcttacggcaagcagcggtgtccgatcttggactaccgacaaactattctcaaggcaacgagttactgtcatgcgtgtcgaagacgcgaaggtcgcactgtatgttggtaatgcgactgacagtgttaactactacgcgcatgaagccgatcggtttgccgcagccgcattcgaatcagtgattacaaaggcggtgtgcggtgagctaccgagatcatacgggtggttgttgatccaagcgtactacgctgcgttcttcgctactcacgcgctcttccggctcgccggctgggcctgtactcgactcacgtcagagaatcttcgattcataaacgacgagatcaagacaatctatgggggagccccgctggcgggcggtctttatctcttgaaatgtctggatggagggcgccagctcacctgcgagcctttgggagcgttctcaggaggatctcacgaagcgctgtggacactgatgccctcttatttggcccacatcaggtctttagcccttggcgcctcgaacgttgatgcagatgacactgcgccgattgaacgtttggaaagcttcgtaaaagcaaaaggaggcccgaactggttctccactgtacggaaccgtcttaactattctcacggctacggtgcctggcacccatacgtgaaatcgacgtgtgcgcctgaacaaataggctcggctcttgatgcttggcgaggtgatatcgacgggagcggcatagcacaaggcactgatgagttgatgcactttgctagagcttgcgctctcctggtaggtttctgccgcctcacaacgagggatctcgcagagcgaagtaaggcccgatccccatttcgatgctctagcgctcggctcatcgcccttggtgcaaattagagggtaatacaacgacgcgatgcgtacggtagtggaaggaaaggattaggaaagggggcagatctatttcaaaatcgagtcgaggatagatctgcccccctttcgtcatcaatgcagttgggtgcagacaaaaggaccgcgcctaagctcgatcgaatccccccaggtctgtcacttttataacctctgaaagcagtatgcctttggtcattttaatatcatgcaaaagctgctgggataaggcgatgtatttttgtagatctctactgtttttggcgtaatatttatcagcggaatttagtttgtgtctagatcgatcaaacaggtcgatcgattcttcaataatcttgattgctgcatcgcgattgttgatactttttgagtagtggtatcggccaatccccattctaagtaggcaaacggactcggattttccctctcgatttgccttggagatgaatttgtcaccattttctatatcatttttgtgatataggataattccgtgggttagcaatgcatcggcatttttgtcattaagttcgactgccttcgctgatgcgataaatgctaactcaagcttgtgtgccttgttgagcagaaaccatgcgaatcgatcatggagcgccgaattcaaagggtcatcctgaatcgctagctcgtagaattctttggcttctgatatttttcccttttccgatgcaatttttgcggcttttgcgtatggacccttaaaggcttctgctacgcgatcttttttgtactctcgatcaatggcttccctttcacgagcatagcggtccacttccgccgcataattcatgatctcttcacgatctgtcgaggtcaacttggccagcttctgagagaaaaagcgtttcgctagttcaacgatctcgagttcataagtgctgccttgtttcgtttggttggcaaaataagtctcatcgagacttaggatgaactcatcatgaggaatgccaacctcttggcatgcgtgccctattgagaactcgtctgctgggcaagtaatcgcgactaagacaagaaaaacggttctttggccttgggtcatccttagccaggcatcctcatatagaaattccagtagctgatcattggtctttcgaaggatgctcgtaagcgcctcatcaataccgaccgccgttctggcaatgtacctgacaagagcatcaattaataagggcttttgcattaactgcgttccagccttgcgaagcgtgttatcccccgcctgaagaataggcttcgcaccatactctttcgctaatcgcctcatgagtgcggtagattcgaagtcgcttagtctagcaacttgaattggtgtggcgttcaagagttcgcggcgccgggaagtcactataactctaccgatctttctaaccacctggttaaagaactcttcaagttcttcattatctgaggttgaggaggttagtgtctcggtgttgtccagcacgaggagcacatcatctctcttgtacccttgttctttcagttgctgctgaactttgtcgataagggctgtgccttctactttataccaatctttacccaatacgtcttgcaggcaatatattaattctctaatgccatcccccatcgcgccagagattccgcggaaatggacgattccctgatctgtccacttagtcatcttggcggtatagtagctaattatttcaggaggtgcatttaattctattcttccgtccagtatttgattcaaaaattcgagggcaagggtggtttttccgtatccaccgtctccatagattaggcaggattttgactcctcaggttcatttatccaggccttgagtttttctaactcttttgatcgcccctcaaaaatggatgtctgccttgacggtatgttttggaagagagtgtgaggagaaccattgcagataaccgtgctgcaattgaactttcctgccttggcgaagccttgctcagaaaatacgttctccctagggaggtcgaccagaaattctgctgcattttcccagcatagttgttggccaagaagtttccaaatgcctttcttggaggtgatcttggaaatgactacggccttactattgtagactagcggcgtgctaattcgcagattttcaaagtgattaggtaaaactagttcagcgctgccctctgtgtagaccggtagtgaattggaaaagattgataatgccttctttaggagggtttcggccttcggcgtccagtcacgaatgtcgccttggtcagtcactccgtgtgcaagcaccttgtttctgaattcaacccattcgataatctctgatatcagtggtgagccgaaattaggtgtggcctcgtaccatcctcttagaaaatcggggtatataaatgatcttattagaggggtggctttgtccaatagctcccccggcaaaccgtcggccggctgatggaaacgggaggccaggtagtcgaaatctgattgttctgagctgctcaagtttcgacggataatttccaaagagactatggagcaagcttgcagtaaagagcgtagtgtggagttaatatgagtcagcttctctagcgaagatgtcatattactgatgaccgatatctctcttgagtagatttctatcattgggattctattttggattgttgtttagggagtatcctatttcgcgattttctagatggtatcatcaggacaacgactgcgggtaatcgccattgagccgatagcggccggatcgtcattggctattgggcaagcgctctgcatagagcgttctctatcctgcgcagttctctttcgaaccctgccgaggcagtgcactgctatctagtccactcgagcgtgcctcgatgaacgtccaaatggcggctattgggtcttcgtcgcgccatagccggtaaccaatccgatagtcccctttggcactactatgttgtctctggcagagattgagggacccgcagcaaagaatctacgaatcccttccctctgcggctactccgaggaaattacgacaaccttgttccgtacttccaccgtgagcgcttgcccgatcttgaagcctgcctgttccaaccataccccacctaaccgaatccatggaacgcatcgcatcccactatagcgattgccttcggttgccttgacccggaaatgcctgtagctggtcgtgaatgtgcgcacgtgcgcagtggaagatatcttccgcatagcgaactcctgattcgaaatttgaattcgcccgtgcaagcagggcggccgggcacttgaacaccgcccgcagatcggcccgcatgtttcccctttcgggtcttgtatcgatgcgcgctgcccggccttagcagaaagctatggaagacacgccacgactgtcggacgtggcaacgctgcggggggtgtgttcagcaccgatagctaggctaaggattgcggatactgccgccaatgagacaactctgcattgcggtaccgcaacccataagggcggagaaagcggcggatctatttcaagttcaaagatagatctgtgccctttcgtccggtccgccaccctcatgagacttcggcacctccatcaagctgcacctcgtccgacacaggccaaaacttcccgaccagcctttcacgcggaatcgatgcaatcgcagccgtactcaagccttcgctgtcgacagaaatgcccctctgccgccgacagggcaagggcgacgccctgtgcgggggtcggaaacgtcggacggaacgcctcgcgatgcgaccagatccattgcgcgacttcgtcgacgcaacgctgcgcaagcgcggcgtctccggttgtggtgcacacaaccgccgggccgggggccgcgatatccgcgtaggggaaaccgtggaaccacgagcagtcgatcacgccgggctgtgcgggcggccagcttccggcaaacgtcgttgacttccgccgggatgagcccgtcttgtgtcgtcacgatgtacggcagcatcggcaggcgtcgcattgcggtgactggtttgagcccgccccgaatcatctcaagcagcagctcgacggcttcgacgccccggtcatggaagtcggtatgcggatacagcttgcacggcaacgtcaggtcgcaagcggcagccagcttctgcagcctgcgttgcaagcccgacaccatgtgtcgagcttcggttgaggctttctggctagttgccggttgccaacgcaggcgcggcagcggcgttcgtgtcactcgatcccatttcggccagtcctacggtgtaatgaccgccggcctccctcttcagggcgagaaggtcataggtcttcagcatgtccaccaagcccgaatgtccatagctggcgggcgagaagctggggtcagtacgcttgagatactgtcccagcgcgccgagatgcacacggccctcggaggtgtttgcggcaagcaagctgatggcttcgatcacaaacctgggccgccgtttgacttgaggctgctttggcggagttggcttcgtctggatgggagcacccccgaccgcctcggtaaccgctgtgggggccggtgtccactcgaagaactggtcgctggcattgcgcagcgcttcgggcgtctttgattctccaacgatgcaaaccgtcgcgccacgctctcggagcttacggcagagataggcaaaatcagagtcgctggttaccaggcagaacttgtcagcccggtggtcgaacatggcttccagcgcatccagcgccagcgctatgtcggcggtgttctttcccgccgcgtattgatactgaaggcaaggcgtaaaagcctgccgaaccagagcttcttgccatgtctttccgagcgtgctctgattgccatagccgcgccggagcaccacgcgtccaaactgggccacaacgcgaagggcgtagtccagtatctccggcgttgtgttatcgcagtcgacaagtacggcaacgcgagattcggcaacgaggggtggtgcgctcatctgttcgctcatcgagtgacgaagggtgacgtcatgataatggcaaatcgattcccgtccgtcgagcgcgttccccgactgaagggcagcccgcaagggtagtaccaattgacgattgttggtcagtcgcggcagggccgggaatccgccaaatgccggagcgggaacagggtcccgccccagacggcctgccggctaacgattgcccgatagccgggacggggaaaagagtcgatcaaaatggcgaattactgagagcttccgaacaaaccaattcccagcggcggatcaaacgaaccggcttcatcggtccagccgtcgaggttgccgcatttgacccggtaggaaactaatgcttttgtctcgacgttgaccagtcggcatcgtgtgcccggctgaacggttccctcgaaaggcccgtgccgttgcagaacgtcaagcggggctctatgcagcggaacgggtgctactgccgttcgccccacaacgtcaatggtatatccaccgaaccaagcgtaagcgaggctgaacgcaacggcacatacgccccagacgaacaccttaccaattgccagacgcgccaccttcgtaacccttcccgtagaatctacgttcgacaagccggtttgacttttccagtgcggccagcaattccgcaggggataccggcatcgggagatagcggggatcatgcgccatgatgccaatcatctccagcacgtccgcgacattcgaactacacgaattatcgagcacactatactccgcgtcggccattacccgtctgtccagttcgacacggataatggttctttcgcgggggctaacccataaatacaggccaactacatcacgcttgaccctttgcgtattgctcttaaggtattccgcaagcgggcccttgtagtacctttcatgcgctcggctgtacaccgtaccgtctatgcctatggcaacgtgtccgaaggcggatgcagggcgtggcaagctgtcgaagacaaacacctcaacgtactctcgcttgatatagacggacttcggctcatcattgttgataggtgtcgtcgcacgcgtggtgacctttgtcatccgcttgttgtttggggaaatgatcgtatcagtcatattcatccttccacataaattgcaacgtcttccgattgtgtgacgctcgatagcaggtgggtatgtccatcggcgtctgtcgtgccgtgttcgatttcaccgtttcctcgcctgatcgcgtaggcaatactcggaactggctcttgcgaactcgcgtcgcgaatgacaaagcgctcgtcatatgcgagcactgaagctctatcttcggatgcgccgccatggatagcgttactcgatgtctgcgtttggtcgtacccgctgcgagaaacctcaatcgtgaaatcgttctgggtagggaatacgaaaggcttgtctgcacactggcagttgacgcgggcgccactcacaaggatttgtttgccgaagagatcaaaagccggataacaatcgttcacaaccgatccgctggatttgcaggctggacacgtcgcaatgtccccttccacgccgacgctcacgccgtggtggatcatgtggtttgtatgggccataagttggccgcccgtgctggttggatcgccattctttagtgcgtagcgaatatccggcattgccttctccttgtcatggacgaagctccatcgatcgtggcagatcgccaccatgggatagaactgcacgcgggttatggccgcaatcagacaaagcctaaaaggcactgcgaatattcccccttcgataccccagcgctgcgccaccgcctgccccggcgttcgcatcgatctcagggaatgaacagccaggaagttcagcagtcgctgcacacgcggcacaaggagaaaggcacacacaaggagaaaggggacagatctatttcaaggtctaggtcagaaatagatctgtccccttcgccccgtccccttagccccaatggcggccatgtgatcttccgttgagccaagaggataaggagggtgggggtgggcaagggtcggaaggggcgacggattaccgatgcggtcagtcagccctcaccccgctgcaaaaacccccgcaaaaacaaccgaacagcacgccgcaccttctcacgccgcggcgcatccaaccccgccacatccaatccctgaaccgcccgatggaacggctcggccgccacgctctgcaggaacggcgaggccacgaaggcgatctcgtcatcgctcggattgccggcagcccatgtgcggaataccggctcgaatgagcgtgccgcgccgaggatggcgaagtcgactacggttcgggccagttgtggaaaccgcggtgcttcagcaatcgtcacgcgatacaggcccaggacctcgggtcgcaggattcattcgagcagctcgcaggccatgcggaccaggcgttcctccagcggctcgctgtcggcttgcgccggctgtccggttcgcaggttctgcgccacgtagcgcagcacggccgcctcgaagacttctgccttgccggcgaagcgggtgtagtaggtcttcttggaaatgccggcggcggcggcaatggcctccacgctggtggcgccatagccatgctcaatgaagagccgggtggcgtgatccatgatggtgtcggcaagctgcccggcccgaccagcgcacgaacggcaagcgccagattgccgacgaagccgccaacgttcgccaggctgttgatcgcaccgatgcacgccgctgccgtcgtcccgccgaggaatgccgtcggcaacgtccacatgatcggctagaagctgatgatccctgctttgtcaccccgcggcgtccgcaacgctcggagcaagctcttgaacgctgccgttcgcgacgcgatatacgcgatctgacgcctggaccagcgcatggcgatgcgtaatcacaattatcgttggtacccgttgccggacacgtgcgaagattcgcgcctcgcgttctgggtcgagcgatgacgtgggctcatccagaataatgaccgctgggcggcgcgcgagcgcacggcccagcgcgacacgctggcgttcccctcctgatagggccctgccttgaatgcccagcgggcgatccaggatatcgccgtttccttccgcggcgatctcgtccagttcgagcaaagcaatgagttcgtgcagtgcgtggtctgacggcgggttgtcacagccgtaggtaagattcgccctgagtgaaccggtgaggatcatcggcgcttgaggtgcaacagcgacttcgcgtgcgatatcgctgacggacagcttgctgacgtccgcgccaaaaaggcgaacagtgccagccgcggggcgggcgagtccgagcatcaagtggaccaggctcgatttgcccgcgcccgatggcccggtgagcgcgacaagctcgccctgcctgatagtgatgttcacgccctgcaaaagctgcttctcgccttgtgtgacaactgcgtgctcgatgcggcagacttcgttggcagttcggtcgatgtgcacgctagattcgctgcgctcgattggcagctccagaagcccgaaactctcgcgcagcgcgagatgattgcgacgcaaatcggacagtgatcccgcgagggcagtgaaaggcatcgccagtgtcacgatgtagctaacgatcatgacgaaatcgcccgcgcggaatgccgaacgggtgacgccataggctgtcgtcaccgtgaagagcgtgagcaaaaggccggtgcagatggcttgcgccgcaagcagaagcgcgagccgggtgtttccgcgggttactttgccgatatacacatcaagcgtgcggtgcaacgcggaatcttctctcgcgtacgcgttgttgagtttgatgtcgagcatgaatccgagtttttcaacaagatggctcgacagcatgtcggcaccgctgaaaatctcctcgtgagcgctcttgcttttgtccgcgaggaaccatgttgcggcaaagagaagcaacatggatatggcaaatcctagagcgaacgcgcggtaggtcagttgccaaagaacgatgctggacagtatcaactggagaacagtcgggactattgcccagaacaccgcaaacgtgattgcactgaaagctgcgcggcttcgcgcgatgactgagaccagcttgcccggatcttctgcagtcaggcgggggtagtcaactcggatcagtctggcaaagatggcgttatggaatgcggcatcacaccttgcgagaacggctgcggaaagcatggctttcagccaatcgaatgcgcgagcggtagtccaggcgagtccgtaggcggctgccagaagcaccggcgagccagtagcgctatgcgtggcgtctacagatagagcattggttgcctcacgcaagaggtaggggactaacgtcgacaatgccgcgaccagcgttacaaataaagttgctccgcagaagtggattggcaaggctggatattctctgaccgtgattcggtaggcgaagatccaatccttatacaaatccataagaaacctcatcgtcatcacctccaggcatcaacgtcatatgcggcctccaggctcagaaattcgcccccttttgcgaattgactatccgggcatcgggcgccctatcaagctgacgttcgcgccacgagttgtcgtctgccaagctcttgtcgcgcaatagacaggaatgcttgcagcagatcgggcgctccttctgtgctatgtacgacgcctagtgggtcgagcggtgcggtgatagcgatgtccagctcgcacacgcgcccgctggccaccatccctgtcgatacactgcgcggcaaaagggtaacggctccaggttgctggagaaatccttcgagcacggataaggacatagttgagagcggaaacgaggtggcattgggcagcgcgccgagaacgatgctctcaaacatctctcgcagttggacgctggctggtggcaatacccaccgcgctccatccagtgctgcgagggacaagccagccaccatagacagcgggtgagacgatgcggcgacaatgattgcatcatcctcaagcaatggctcgaacatcagttccgcaggtagtcttcgaggatccctgcagaacaatgcatccagtccacctccaatcagcagcggcaataggcgcgcacccgaatcctcctctaagtcgacgtgcacatccggatgcgtgccatagaaggcagccaggtgtggcgcgatcagtgcgtaggaagcagccggtatggatccaatgcgcaatgcgctgatagcgccccgtttgctggccgcaagatactcagcagattgttggagcctggccatgacttcgcgagcgcaggagatcaatccacggccgctctcggttggacgaattccgcgcgcatgacgctcgaatagcctcatgccgataaccctttccaacgctgccagcgcctgggtggcggccgactggctcatgcaaacctcagaagcggcacgcgcaatgctcccgcaatcttccaccatcacgagtagctgaaggtgtcgcagacgtccctgcctgacaaggcgcgcatggatagtcttggcgagcagtaagctgcgggtacaggcaatcgcaggacgctctggtggttgtggaactagatcgctcgcgattcttgtcatttgacagccgcagatttggtggtcttcctacctaggaaatttcctgatcaccttaacgtagattcgagagaggcccggagtccaccgtgctgctgcaaaagcgtctgcggatagcgtctctcattttccgattacgtatcggcgatggatactgtctcggccatagcctttcctttcgcccacggcctaggaaattgagtttaggtctggcggatggttcctaccttgcgtagtttcatgaactttgatttgaatcagagtaatgaaaggctagtagggctggctagtagtgctggggagactaatcgctctcttccccgctgatgcgtatctggatagatggattattcctaacatatcgacccctaccacgctggacatgtcctcacagccgcaagcgaagatattgaagaatccgatagccgcaatagaaattcatcttcaataggtcgcaccggactaataatcttgattcgaatcggcttgcatggtgcgttgccgattcaagttgaggacaaaggagatgaagatgaattcattgcacaagcacgaggccactcaaccttcagcacgtccggtgatcttgttcgagatttacaaggatctggtggttgccgactcacgtacttcgatccactcgccactcgagacaccaaagccgaaaccggagctgccgaagaatcggtttcccggagacagttcaacgctagcctatatgtgatcaaccattgcggggccgcttccgcccggagaaatttctatgctgaaggcaactatcaacatcgatgatctggtgcggacgccccgtattcatagcgggggcattcaggtggagggaagcgacattactccatttcccaacccatgcctccgtactgtatttgtacaagggaaggatcgttggatctacgccgtgctcgaacgcggtgcgcagaagttggacgatcgtcttccgactgtgcatgatgcccggtcatttgaagactatgccagcatccatcggacaattctgagttggcctcttgattatgtgttgattgaagccgtttccaatggggaaaatgcacagcttcgcatcacgtctgggaggcttggagtcgctcccctctatgcgactgtgggagtggggcgcgtgttgctgtcctgggactgcgctgacttgatctctcgggggagtcattctgccgattttgaggtgctggcccatgctctaggcctgcgcaccttctacgccagtcgccaagtttgtacaggaatagcgctgctgaccgagcgctcgtcactcagtcttgacgcaaacagcgcgtcattcgcttacccgtccgcggcgccagcgctatcgccgcacgctttgcgggatggagtggatgcgctgggtactttcgaatcatacttggagggcgccatcggtgctcgtcctctcgatgcgagtgcatgtatagcggaactaagcggaggcatggattctgcatcggtagcgattgccgcagcgcgcgttctcggcggtctgaagcaatcggctggcatcgtgcttgctggaacggaccataccattcagaacaccaggcggaggctgatcgcgcgggaaatcggccttcgcgacgcgtcctttgacatgtcgacgcatatgcctagtttggatctggatccttccgcgagagaacctgagcatccccttggcgaattttatctcgaggcattcgatgagatatggcgtcacgcggcaacgcttgggtgccatacacttctgacgggaatcggcggcgacgaactgtttcctcgctatcagaccgacaaggcagccggcgactggaaaagacctgcgcggttgatcgcggcagaacgtattgcccgatcaattctgagccgtcgtgcccaagtagccttggataccgagccgttgtattgcgcgcccgccagtgttgttccccatactgggctgctggctcatgcctcgcgctcgccgtacatgctgcgacgcggactttggccggtgaatccactgtgcgatccggcgctgattggattctgtcatcggttaccgggggaatttcgccttgaccggcaactactccgccagtatctccgtactcgtctggagcatgatctatttccaatcgggtacaaaaaggagacattcgactacgtgcttccggaggtcatcgggtgccattacgctcgattgagtgcgcaactccgcgaaagtgcactggctgactttgggttggttgatatgaccgcggtgaggaaggtgctaagtggcgtagccgatacacgcgacgttaccgcgacggcgccactcgcaatttttctttttcttgagcgcttcatgagacagatcgcatagcttatgactgaagccgctccctccaacgacgtcgcgctcgtgcgacaggccatcgtagccgcctatggcatagacgtggtcgatgtccgtgaagtcgtacgcggagtgaaccgaactttctacctaagcgagtctggggatcggacgtactatctgcgcctgtacagaatccatggacggggcgacgtagagattgacgccgagttgcgtctgcttgagcggatcgagcaggatgaggtgctggccatatcggtcgcacgcccaacgctagaaggagcacgcagctttcgcgttgccttgtcggatggtgcgatgcgtcgggcagcgttgttcagcggggctgcgggccgccccttgggaatgacgggggatgatcttggcgtggcagcgcaagcgctgaaacgccttcatggccagccgccgttaaaggagtgcgcaccacgcaggcagatcgccgatctttgtgaagccgatcggacgctgacccgtctggcagaaagattcaccttcgctggccatgctgtcgccgcggctcggaaacgttgtgagcgcctggtggccgcgggctggccgcctgctgagatgccgatcggcttttgccatggcgactatcgtgtggcaaacatgcggatcgatggcccccggatcacgttgttcgacttcgacgattgcggatgcgggccgcaatggttcgatctggccaccattggatggtggcttgagattgacggcagatacgatgcggcctttttgtggcgcgcgttcgtcagtgcctacatgccggcattgcatggatctccggccttccgccatgcaatctcgcttctgatcctacttaacgagattaactcgattcgcttcttgctcgattactgtgcactggacgacgatctgtggcgcgacgtgtgcaagcgcctggatgatatgagctaccgggtggtatcggggcagctcgcgattaaccgttggcctgcgtgagcatgctgtaatgcctgtcgatggggactcacgtgaatctggatggtgaaatgaaagtgcgcgctgcgaagcagggcgatctggggtggttgctggtcctgcattcgggcggcgcgttcaatcgctggataatgcgtggacccgaagatctgcaatccctagcggacgaattctccttcaagctagcagcgcagcgtaagcgccagggcgtattcgtcgtggtggacgtcaatggcataggtcgggggtacggtgtgctgcttttgtctctcacaggggatagcgctcatgtggaattcggcgtggaccctcgctatcagcgcaagggcattggtggcgcgctactcgacgagatcttgcgtgctggttgccgtatcgggccaaagctcaaacgcgtcaaggcagtatgtcatcaagataacgagggctgcatccggttgctaaggtcacgaggcttcatgtcgtcagcggcgcctgacatagcagcgcttccatacctgtcgtggcacctgatcgttgatgctggggagattcctgcttgctcaccccgcttcataaatggagcctgagagaggctcgctaccgcaacccaggggcgacgccaatctttcccagtcgcctagcccatgggctggcgaaagtatctcccccccagataggccaaatacagctgatgctctggtcgactagccgaacaaagctctccaaagatcgcttggtaactgatggctttgaacttcagttcatcgccaaccagttcatggaacctccggatctcgtcccgatgacgttccccgtgtggtcctggccaatcgaagtacacataccggagtacccaacggctttcgtactgacgggccagcgcaagggcatgcttgagtagctgtggcgcgccaatgtgccggaaggcctccctgcccgcttgcagggcttccgctagcgcctgtgccctcggcaacccgacctcttcccagcggctgcgcccccgcgcaaggtatggcggcctgaacgcctcgccagcctgcgttgccttgccgcgcagccactccgtgaacttgctctccaaaccggccatgatgccgttcgcaagtggcaggcacacatccagattggcgtgactgtcgactcccgtggacagtttggattcgaatagcgctgcggtggggcaggagggcagcgccagcgcattcatcaatggcgtggcatcggcgcaatcggtccagaaatcgaagatgttcgcggccagcgcagaggacgaatgcagggctcgcatctttgctggcttgtccccacgctccaccagttcgctaccgtcgccgtttgcaaatgccgcaagtgttgctggcgagagtggccgcatcagattcaggtccagattggggacataaccgcgtgcgtcaaaggcgatgccccggttcgctgcccactcctgctgttccctgcaaatggctgctacagacatgaatgacctccgtcgagcgcgttcccccagccgaccggtggtgttgcgaggggtcgtggttacggttgccgattgtttgtcagtcggggtagggagggaatccgccatatggcggaacgaggattgagccaggcctgatgacctggctgacacccgctcaatctatgccgtagtcgtaaggtcatcaaggctcagcaggcgttcgccaacgcacagacatatgcatgagcccaggaaaggattgtgcagccgaaccacctgcgagctccgatgttcgacctgattgatgcgctgcttttcgatgacgattttgtccagttgtgggagcctcagtatgacgcgatcgcgcacgatgaagcggaataccagtccctcgtccaagcagtacgcaaggacgtcgattccattggtgccataagggaagcgaccctcaggcgaatacttgaatggaaatccgcccgcaccaagggtcatgtgcactggtggaactacggtctctacatcgagactgtgagggactgtctctccatgcacggggatgatcgactggacgccatctgcaaactaccgggtgttcgagagcgcgttggatcgacaattctgcatttcatctatccggacacctacccgattttcgacattcgaaccctggaagcgctccgctatcttggcgccgacctcgggaaatccttcagtgtgaacaactactatcgatttcgcgagtacctcatctcgacccaagtggtgctgaacaggtggactctccgcgaattggaccgcgcaatcttcgcctttcataagcgcagcccggagatattcggcgccacactgggcaatggccgccgtgcccaatcgacgacgcatccttactactgtccgagatcgggagcctagcgcctccacctcgcccagccgtttggcgtcctgcggagaaaggggacagatctatttcaaggtctaggtcagaaatagatctgtccccttcgcccgtccttagccccaatggctgctgcgtgatctgccgtcgggccaggcgagccaaacggatgaggagggcgggggtgggtatggggtcggaagggcgacggattgccgacgcgggcggtcagccctcaccccgctgcgaaaaccccctcaaaaacaaccgaacagcacgccgcaccttctcacgccgcggcgcatccaaccccgccgcatccaatccctgaaccgcccgatggaacggctcagccgccacgctttgcagaaactgcgaggccacgaaggcgatctcttcatcgctcggattgccggcagcccatgtgcggaataccggctcgaatgagcgtgccgcgccgaggatggcgaagtcgaccacggttcgggccagttgtggaaaccgtggtgcttcggcaatcgtcacgcgatacaggcccaggacctcgggtcgcaggatccattcgagcagctcgcaggccatgcggaccaggcgctcctccagcggctcgctgtcggcttgcgccggctgtccggttcgcaggttctgcgccacgtagcgcagcacggccgcctcgaagacttctgccttgccggcaaagcgggtgtagtaggtcttcttggaaatgccggcggcggcggcaatggcctccacgctggtggcgccaaagccatgctcgatgaagagccgggtggcgtgatccatgatggtgtcggcaagctgcccggcccgttccagcgagggacgtccggatggccgcacggatggttgtctggatggcgccgccgtcattgcggtttctctgcccttgcgcattgcaatactgttctccgctgtcggcctgattgggtgagtgccacggcagatgcgggcccgcatctgcgcatagggaaagcatggacttgcgcatcggcatcgggcgtcctataaaggaaacggtctcgtttcctttgccgttttctttataggacgccccatccatttggccaagaattataagagggctgcatgcagccctcccgccgctccaggagacccgaatgtcgcatgatggcaggctgtcccccgcgttgccgggccgtgcaattgaccaggccgcgcttgcggcgcgtttcggcgccgaagccacggcgctggtgatggaaatggccgccagcgccgatccgctggccgatgcggccatcgccgcgctgaacagcggacaggccggccatccggcgatcttgcaagcgggcctgcgggaagggcgcgcaagcctgtcgagcccgcccgaggccatcgacgccttgctccggcaggccgagtggatcccgccgtgggtggatcccgaacgcatacggcgcggggccgaagcctatctgagcattggcgcgctgtggacgagcatctcgcttggcccggggtcgctggcgcatacctatagttctccggccattgccagcgtactgatggccaccggcaacctggatgcgcaatctccgcggcgcctgctggaaacggccgtctggcagcaacagacgctgcgcccgggcggcctggcggccggtgcgcagggctatatacataccttgcaggttcgcattctgcacgcccgcgtccgggccggcttgctggcgcgcggatgggacaccgcgcaacgcggcatgcccatcagccagctcgacatgttgcgcacgtggctggatttcaccttcgtgcccttcaacgcgctggagaagattggcattgaatttgatgccgacgagtttcgcgacctctaccacgtgtggcaactggtggcccacttgctggggattgaagaccgctactaccgccgggtgaccgaccaggcgtccggcgcggaaatgctggcgctgatcgatgcagccgccggcgagcccgatcaggccgccgcgacgctgacggccaagatgctggatgcggccgcccaacgcctggggcctgccctgggcatgcccgcagacgcggcggtgggtctgatgcacgctttctgccggctgttccacggcgacgactttgccgacaagctgggcgtgcaacgcaactggtggagcgggctgatgccggtcttcgccaattcgaaccgctaccagcgcctgcttgagcggagcgaccccgaggtccggcaacgcaagatcgccgccacgctggcggcgttcgatcagcagatcgcggcgctcaagggggagacgacttatcagcacaacctgagtgcgtactcgggggcggggatgcccaggacgcttgcgggtgcgtgataggggcgggcgatactgactggcacggcaggccgacgggagaaaggggaccctttcatcccgtcccaggagatcgcggactgctccgccaaggtggctgatattgccggctccagaatcctgagcgtttgccgcattggaggaacatcttgctctcagccgttcgctttcacgacaagcttgatcagctcgctctgcgcaacgcttctttgcaggactcgagccagagccctgctaccttactcagaagggccaatgtggcccgcgatgtgctcgacatttttgcgacgcgatgacaagggtgttggaatgcatccgcggcgcatcaatttgtgcggcgctatgccgctcaggaagctgacgagtaacccatcgatcagtcgcgagaaacaccgctacaaataggcagacaccaatggcgtaggagagagatgcccgcaaccgttcgcccggccggcgcagtaagacaaacagcaaaagcagcagaccgcagagcgccaatacagctgcgcagaagactgtgatgccagcaatcgcagctaatgggccggttgtgacctgtgcgagcgtaacgggcgtccgagcggcaatcaccgcgaacgttatacccagcaaggtcatggccatggcacatagatccactaggcgaactaccttacttgctttgcgtttcatctacctaagcccttcggcaacaagacgttccgccagtgccgcccaacgtcgcggactgtccgaaacgacatgagcataatagaaatgtccttcgccttttcctgcaagcatctgcctgctgagcaatggggcaccagccaccaactccagccacggaatgcctgcatggatcggatccccatactgcaccaggtcaatcacgataaccttccggatgttccgatggccgcgcaggtccgtgagaaacgcttcggcgattggcgaccctaccagaaccagatggtcgatgatatgcccttgcctggcgtatgaccacgcggtctgagcggccagcaatgacccatagctgtagccgatcaggttgaactgaggtgcctccgcagccatgccgctggtgattgtccattcgccatcgtcgcggtttcggatcaccatgccagaccggatggcatccagcagcatgccacccaaggcgtagtcttgcggcaacgcgtgcgttgcagagttggtcagcccggcaaagcactgggaaatgccggctcgacggaaggctgccagctgaggttggacgtattggccatccagcccagcaccaccccaatacaatgtaccccgcggccgcaacaggtacaccttgactggttccctatccgaaaccggcgtcagccggacgttgacagtcttgagcggttgcatggttatgcaccctccccaaagaccacaagcctgaccgtcgccgcacggtccgcgaacacaggtgtggtgaagccgttgctgtcggtgtggccttcatgcgttccggtatcgccgatcaggcgataccgccagtttgccaagggccgtccgctgccttcatcaagcaactggatgcgctggtcgtagctggcgggctcgcctgagtgcaacgcttgcgtggtcgcagcaaagccgctgggcatagcgacacgcagcttcgcaatgtggtccgcggtgatagtcatcgtgaacggacgcgaggcatgaaagacaggcgctggtcggcaaccgcatgcacagatgtctccgctgagggccacttccttgcctctatctctagaggggatgcgcggaccgacacagacaatcacgcccgggcgcttgcatacagggcagtagacggcatcgccctcgcgggcaactggcttgctgtgccagaagtaggaactgctgccgccaacgatgacagcgccgttgtcggccttgtcgcctctgaccagataggttcgggtcaccatggcgcgccctcagcgtcggaacgaacgtaagccaagatcggcgcagggcagaggtctttcgatctctcaagatgaaggttatcgtttctgattgaggccattttccgtgttccatgagcatggcaggtcgccaccaagacatggaactagccgtgcggtatggaatcaatcaggcaaatcctaaagtggccgttgaaattgcgtccatatattcacccggctccattgaacgattcatgcgactgaccgcataagctatgacatcggacagcgaaaccgcttcctccaacgacgtcgcgctcgtgtgccaggccatcgtggccgcctatggcatagacgtgatcaatgtgcgtgaagtcgtacggggggtgaaccgcaccttctccctctgcgactctggcgatcggacgcttcgccagtacagaacccatggccggggcgaagacgatgttgacgccgagttgcggttgcttgagcggatcgagcaggatgaggtgctggcagtatcggtcgcacatccaacgctagaaggagcgcgtagctttcgtgttgccctgtcggatggcgcgatgcgtcatgcagcgttgttctatggggcagacgggcgtccgttggaaatgacgagggatgatcttggcgtggcagcgcaggcgctgaaacgccttcatgaccagccgtcgctaaaggattacgcgcctcgcaggcaaatcgcagatattcgtgaagctggtcggacgctgaaccgtctagcagaaaaattcaccttcgctggaagtgccgtcggttgcggttcgggagcgttgtgagcgcttggtggcggcgggctggtcggctgctgagatgccgttcggcttttgccacggcgactatcgtgtggggaacatgcggatcgatggcccccggatcacgttattcgacttcgacgattgcggatgcgggctgcaatggttcgatctggccaccattggatggtggcttgagattgacggcagatgcgatgcggcctttttgtggcgcgcgttcgtcagtgcctacatgccggcattgcatggatctctggccttctgccatgcaatctcgcttctgatcctacttaacgagattaactcgattcgcttcttgctcgattactgtgcactggatgatgatcggtggcgcgacgtgtgcaagcgcctggatgatatgagctaccgggcggtatcggggcagcttgcgattaaccgttggcctgcgtgaacatgctgcaatgcctgtcgatggggcctcacgtgaatctgtatggtgcaatgaaagtgcgcgctgcgaagcagggcgatctggggtggttgcaggtcctggggagattcctgcttgctgacccagcttcataaatggagcctggggagaggctcgccaccgcaacccagcggcgacgccaatctttcccagtcgcctagcccatgggctggcgaaagtaactccgcccagataagccagatagcagattctgcgccgcgtagcactgcatggccgccttgaagacttctgcgttgccggcaaagcgggtgtagtaggtcttcttggaaatgccggcggcggcaatggcctccacgctggtggcgccaaagccatgctcgatgatgagccggccggggtgacccatgcactacacctccggctgtgaccgctcgcaagcggctgtccaggggcttaggtagctctaagccatttgtaggctcaaccttacaatggcttaccgttgttccatccgcggctcggctcggcgacgggttctgattgaggcggcggggcctgaggcttcgtgcccctcgtccatccgcgacttggctcggcggcaggctcaaatcgaggcggcggcgcgtggcggttcgctcgcggcctgccaggcggcggggtcgaagcggtcacttgccccggcgcgcaaagggcggcgacagaatcgtgctcgtcccctgtagccgtatggacgatcgctattgcttcgtccatgttcaggccatcatccgctagtacgcgcaggcattcgattagattttctctggtagggcgatagtgcccactggcgttggagatttcgcgaaggatgccttctttgaccacaatctcgccagcgcagatcacactattgccagcattgagcgacgagtgattgaattgcgagctgacgttgccgaccaggcgcccgttttcggtgctgttctgcacgaacaggtttccgtagagatccatggcatagatcgtgatgcccttgggcgtcgaataccaggcaccgttgcggctaagccgcccatttgacacggtaagcatcgttccaaggcgctcatgcttgcgcatatagtggacatacatgctttggctcgagatgggagccagcttctcgtaggcagtgaagtcctctggcctgaactgatcgaacggtcgaccttggaccaacggagatggctgccttgtgtgaacatcatgggcgaagcttccgcccaccggcgaaatcgtcacgtccaatccatacgttatcgcatcgcgaaactggttcctagcttgaatgaacagcattcgctcgacggagtagcccaggttgaaggggaacgcctatgcgggggccgtagagttgcttcttgcgttggaactgctcgtaattcataagtaagagcacctgcttgcgaaggtcctgcacagcaacgcttcgcaacgcgctgttcttcgattctttcccctccttaatcttcatccactcgtcacacgcacccaagagggtgccaagatgctgcatacgcccatctgctgtcggcggtggattggtcacccatgtctccagcagaaagtcgatttgcagtagcttcttcctgcctcgaaagccagaaagcgcagtcttactcttaaatgcctccagactgatcagggtgggtttcatgtggtgcctcctgtagactggaatgatgagcagtgctagcgccggctttcgcgcagcgctattggctcagcaaaggtagtccatcatgagtccgcgccaggccctgtgcaatacctggaaactggtagtagtgaatgtacccattaccagtgagaggaccgcaaggccggggaacaggagtccgatggcaacaaaaaaaggttcttcgaagaattccggggaacgctgcgcggattttgaggaagaaggccaacttgtgcggcgctatgccgctcaggaagcggacgcgtaacccgtcggtccgtcgcgagaaacaccgctacaaacaggcagacaccaatggcgtaggagagagacgcccgcagccgtttgcccggccggcgcagaaagacaaaaagcaaaagcaacagaccgatgagcgccaatacagctgcgcagaaaacggtggtgccagctatcgcagctaatgggccggttgtggctcgtgcgagtgtaacgggcgtccgagcggcaatcaccgcgaacgttatacccagcaaggtcatggccgcggcacatagaatccactaggcgaaccaccttgcttgcgttgcggttcatctacctaagcccgtctatccccgtcgtcaaatcgcgctagatgggggagggcacgcaggaaaaaatggttgatgctgtgctatcccacggtaccccgtccggcgcgaccgttggatggagcccaaactccgtcatggtgctaccgcaattcgtgcgtcacgccgcagccactgagaacatgactcgaatcactctggtgtccaaggcatagcaggcaacggaggccaccacggctatgccggctaccatcagcaatgagcgacgctggtcggggatggtccagagcaagtatcccaacgccccaagccataccagcacaaggatcaggtcagccagaagtaccgcagctgacacaacgcccgcatagccaacgaacatatcgtcccgtgttggcgcagcaactatgtgaaagaggcttagcccgataggcgaagcaggcagcaatacggaaggcagcaggaataaccaacgcagaaccatcacctcacacccctccgctacgattcgagcggccaacgcctgcagcccatagatccccaagggtgagccaccgtgcttggcctgcatttcatccagataaatccatcggcaaaatgatactgcgccattgtctcccagcgcctggggaaaaatcctgaaaaccagggcgatatttcgctaacatctgatttgaataattcaatccgcatttttagggaaagacttatagatcgaatgactaccttcgtttagattcctcgattcaagctatttgctgggggacatcctgtgatgagaaaaggcatcattcggcagggcgacacgaccacgcacggcggcgaggtgttagaaggtataccgaattttaggatccacggcgtacctgtcgccgcggtagggcatatggtttcgtgtccacagtgcaaaggtgcgttcccgatcattgaaggtgatacgtcttttaccgcctatggcaagtcgatcgcactgcatggcatgcataccgcctgcggggcgcagttgatttcgtcaaccagtggctttgcaaacgttgagcacccgcgcgggggaacgggctttgcaagcgcggaaggcgggatggcgcatatcgcaggtgcatggggcaagaacgacgcgtatgacgacctgtacgtgctccaggacagttcgaccggaacgccattgccgaataccgaatatgcggtcgtgcgtgaaggcgccagtcctgagtttggcaagaccgatggccagggaagaacccatctgctgacttccactatgcacgcagcggaagtgaccatttacgtagaggggtgattgaatgtcgagcgcgcttgtttccccatctggcaagactttgattcctgtcgccaggcgcacgacaacgccaacgccagcgaatgcacctaaaccggttcccgtggagcgggaatatttggaagtgctcatcttcgataagctacctcgtccggcctcggcattcggtcatgctgcaattgggattgatgggaccgtctatagccgcgcacatgaaaagtacttcaagggctcgcttacggaatacctgagaagcaatacgcaaggggtgaagcgcgatgttgttggtctgtacctatgggtgtcgccacgcgaaaggaggatcgttcaggacgaattagagagacgagtggtcgaagacgagaagtacagcgtgttcagtaattcgtgtagctccaacgtcgcggacgttctcgagttggtcggtatcatggcgcacgatccacgctacttcccgacgccggtatccccggccgatctgttggcggtgctatcgaaatctaaccggcttgttgaacgccgattctatggaaagggttacgaaggtggcgcctccggcaattggtaggaaatcagtcgttgctctaggtgtgtcggggttggcgttcgcgctgctttacgcatggtggagcggttgtagtatcgacctgctagggcgaaccaccgtcgcacccgtacccctgcacgaagagccgctagacgtgttcaaacggcaagggcctttcagcggtaccgttccatcaggcaccttctgcaggttgattcaagttgaaacaaagggcttggtttcgtttcgggtcaggtgcgggagccttgagggatggacggacgaagcccaatctttcgacccgccgctaggcgttggtctgttcggttgaaagaaggcccggtcaccctgatctgggcctcaaaagttggacatgcaactcttagggtgtcccatgtacagatacagcgcggccaagatcgcagcccgtgtgtttatcccagtgtcgctgttggctgctggactcctggctgcgttcctatacccctttcatctgtcggacgagaacacagcaatcgatgtcatacacatgcagtatgcctgcggagagtgccacgtacagtatcgagtgctaaaggctggcggcgcgaatggccagacacacgcccgaacgttcggcaacgagagcggtgcccccatgcggttttatcggatgggatgtcgtcgtactgtacaaggggtctgaccaaccgctcctcaagtatcggaattccagcgctgtgtctgccgaggattgcgcaagtccagtgcttcgcctgagggggcaattcaaacgtaagctgatctacacgtttctatattccggagaccggtacgacggcacatattttgatgcgcaaaccgcttccattgcgccgcaggacccccatggctgtaaggcgcctggcggggcatcgattcgatagccgtccttgctcgcgaggttacgtgggaaatccataattgtctgcgtcgttcaataagtggagaatcgccattgcccccgccacgccgcccacctaagcgccgaccaccgtgacgtccaccgcccccccacgcaccccccgcctgcacttcgacctcaccaccgtccagctcttcatcgccgtatccgacttcggcagcatcacccgcggcgccgagcgcctccacctggcccccgcagccgcctcccgccgcatcctcgaactggaagcccaactaggcgtctccctcttcgaacgcctgccccacggcatggccctgaccgaagccggccgcgcactactggcccacgcccgcggcatcacccacaccgtccagcgcatgcaggacgacgctgcctcctttgtcggcggcgacctgggcgtggtccgggtagccgcgcccaaatccgcagtcatccagttcctccccttcgacatccaacgctgcgccacggcctgccccggcgtgcgcatcgacctgcaggaaatgaacagcgcggaagtccagcagtcgctgcgccgcggcaccgtggacatcggcatttacgacggcagcctgggcgtgatcgacctgccgaccgcgccctatcggaatgatgaactggtgctggtggtggcgcgcggccatgcgctggcgcggcgccgcaaggtcacgccggacgacgtgctggactgcgacctgatcgtgctcagcgagagttcggcgatctcgatcgtgctggagcggctggcggaggaggccggccgcgtgctgcgcatgcgcatgcgcgtgggcggtttcgacagcatggctgcgctggtggcgcagaacctgggcggcggggtgatgccggaggcgatcgcgcgcgaggtggcggccggcagccgctttgtgcggctgcccattgcggcgccctgggcgcagcggcagtttgtgctgtgtcatcggccccatggggcactttcctcggcggcgctcagcgtgctggcggtgcttgcgcaaaacgcgaaaccagaatcccccaattagcgatagcccgcggcggatgtattgcggatgatggctccataactacaggacggagacacgcaatgcagcgcagacaattcattgtggcggcagcggccgggctggcgatacccagcctggtgcgcgccgccgacatcgccggcccggtgcgcattgtggtgggcttcgcccccggcggaggcaccgatgtgctggcacgcgtgatcgggcagaagctcggggtcatgtggaacaccagcgtgctggtggagaacaagcccggcgctaccggcgccatcgccgccgcctatgtggccaagcagccgcctgacggcaccaccttgctgatggcgcatgtgaacagccacgcgatcgccccggcgctgctggacgtcaagtacgacccgcgcaccgacttcacgccgatttcaatggtgggcgtcacgcccaatatgctgacctgccgtccggaacagaaggtgcgcagcgtttcggacatcgtggcgctgtgccggcagaagccggggaagatttcctttggctcgtccggcatcggttcggcgcagcacctggcgctggagatgttccggttgcaggccaggctcgatgtggtgcacgtgccttacaagggctcgggcccgctggtcgcggacctgatcggcggccagatcgactatgcgttcgacaccatgaccgccgccacgccgtttatccagcagggcaaggtgatcgcgattgcgcagacccgcctgaagcgcgcggccagccatcccaatgtgccgacgctggcggagtccggcttccccgggctggacgcggcgtcgtggtatggcctggtgggcccgaagaacatgccgccggcgctggtgcagcgcatgaacgcggacgtcaaccgcgtgctggccatgcccgacgtcgccgagcggctcaagagctttggcgccgaggactccggcggatcgaaccagcagttcgccgccttcatcgcctctgagtccaccaagtgggccaaggtcgtgaaagacgccggcgtaaaggccgagagctgagcgctgcaagacgatggccgagaaccgacgcacgcgcgcacgctgcccatccatctatccaggaagaagcatcccatgacagatttccgcgactcgggcgcacaggcgcctgcctccaccttgccgctggccggcgtgcgcgtgctcgacgtcagccaggtcatggccgggccctacgcctgcatgctgctggctgatctgggcgccgacgtgatcaagatcgaaccgcccgatggcggcgaccagacgcgcggcgcgatgggtttcaagatgaagggctcggacagcatgggcttcctcaacatgaaccgcaacaagcgcagcgtcaccctggatctgaagaccgaatccggccggcaggtgctttatcgcctggcggaaacggccgacatcctggtggagaactaccgacccggcgtgatgaagcggctggggatcgactatgagaccctcgccaggatcaatcccaagctggtctactgcagcatctcgggctttggccagagcgggccgtgggccgggcggccgggctttgacctgatggcgcaggcgatgtcgggcgtgatgagcgtcaccggctacccgggcggcgcgccggtgaaggcgggcgtaccggtggccgacatcggctgcgcgctgttcgccacctacggcatgctgtctgcctatatcggcgccagggagacgggcaaggggcagtatgtcgatgcatcgctgttcgactccgcgctggcgttctcggtgtgggacacctgcgaatactggggcacgggccgcgagcccgagccgctgggcacggccaaccgcatgagcgcgccttaccaggcgatgaagtccgccgacggctacttcgtcatgggggccaccaaccagaagctgtggcaactgctgtgcaacacgctcgaccggcccgacctgctcgcggacgagcgctttgccaccgtggcgctgcgcctggccaaccggcaggcactgatcgcgatgctggaggagagcttcgtcaaggagagcagcgactactggatcgagcgcctgctcggcgtcggcattccggccgggccgatcctgacctacccgcaggccttcgacagcgagcacggccgccaccgccagatgcgcatcgaaatcgatcatccgatcgagggcaaggtgcccaatatcggcttcgcggtgaagatgggcggcacgccccagcaggtacggcgcgcgccgccgctgctcggccagcatacggaagaaatcctggccgagctgggtatcccgaaggacgaacaacagtcgctggctgtagccggcgcattcggatcatgaaggccgcgctgccgccggagggcggtcccggcaacgacggacaagtcacgctcacgatgcaggggcaggtcgcaacgctgacgttcgaccgaccagccgcgcgcaatgcgatgacgtgggccatgtacgagcaactcgccacgcattgccgcgcgcttgcggcgcaaggcaatgcgggtgcgcgcgtggtggtgctgcgcggcgcgggcggagaggcctttgtcgcaggtactgacattgcgcagttccagcagttctccagcggcgaggacggggttgcctacgaagcgcgtatcgacgaaggcgtccgccttgtcgagcaactgccgatgccaactgtggcggttatcgaaggctgggcggtgggcggcggcctggccatcgccactgcgtgcgacttccgtgtcgcgacgcccaaggcccgctttggcgtgccgattgcgcgcacgctgggcaacacgctgtcggcactgaaccttgccaagctgcgtgcggcctgggggctgcagccggtgcgccgcatgctgctgctggcgcagatcctcgacgccgaggctgcgctcgcgtgcgggtttcttgagggtgtgtacgctgccgacgcgctggaggccgaggtcgtctcgctatgcgaccggcttggcgcgctggcgcctgtcacgcagacggtggtcaaggaggcgttgcggcgccagaccgtgcagtcggtggccgacacggatgacctggtgcgcttgtgctacggcagcggtgacttccgggaaggggtggatgcgttcgtgaaccggcgcccgccggtatggaaagggagttgaacgtcggggcctcgtacgccagccgccggtgtttcaaaattgaaaccatctggctgatttaccgtgcaaccgacacatcgcgcgagcgtcacgcgcccgctcgtcagcctcccgccacgggtggcccgcgatatgcatcacattaatgctatgggcgataaagacgctcgagcctgcatgcctgaacctgtgccatgcagtgggtgtcaccagcgcggctggcggtggaatcggtgcaagatggcatttgaaggtctgtgccatcgccgcgccgcttctaccgtctggttgccgtctcaggaaggagcgcgccatgaagaacaagcttcccccgattgccacactggccttcggcgtctgcctgacgatgtctgcggcattggctgccccgccgggcgacatggtcatggtcactgccgacgaggtcaaatgggcggaccttccactgataccgggtgccaaacttgccgtcctcgaggggaagatggacaagaaagcgccgttcacggcccggatcaagctgcccgcggatgccaaggtgccggcgcactggcacccgggcgtggagcgggtgaccgtgctttccgggacgttcaactatggcatgggcgacaagctcgacccggaaaagacctcgccgctcggcgccggcagcctgattgtcatgccacccaagatgcgccactttggctggaccaaggaggaaaccgttatccagatcaatgcgtcggggccctgggctttcaacttcgtcaacccggctgatgatcccaggaagaagaagtaatgcctggtgcggggctatggatgtctcaaagcggcgcaagccgcgggcaggaccatagcaggcatcggacgtggcaaatacctgatggagagggcggtggcttgcggcaattgccatgacatgcgtgcgattcgacggctggcggtaatccttgcactggtactcgctggctgtgcggggccccggacggcacccacgcctgatgcgcggagcgcattggcgccgacggggaaactccgcgtcggattcatatcgggctccccgatccatgcgacgaaggatgctgcgtcaggggagttcagaggcgttgccgttgacctcggcaaggaaatggcgcggcgtctcggcgtttcgttcgagcccgttgcctacacttcggtcccggcgttgatcgccggcgcaaaaaccggggagtgggatgtcgccacgatgggaatcagtaccgagcgcgcgtcggtcgtggactttaccgcgccatacatggaggtcgagttcagctacctcgttccgccgggttcgcgcatcaccacgctggcggacgtcgacaggcccggtgtccggattggcgtggtggaaaagagctcgccggatgcctatcttgccagcaccatgcggagtgccacgctggttcggtcttcaactattgcagacatggttgaatcgctgcgggccggaaggacagatgtcattttcggaaccaaggcaggcatgtacagccaggccgagaaactcgcgggttcgcgcgtgctagagggccggtccggcggggagaaggccgggatggcaacgccgaaaggacgggattacagtgctgcctacgcgcgcaagtttgtcgagagcgcgaaatccgaaggcctggttgaggcggcgatcgaacgcgccgcattgcgcggagtcgttgccgctccgcgtgaatagtatgcgctaacacctgcatcacccggctacgacttcgtttccgccgattccagagtcctctcaatgcccgctcgggcaagtccaaagacaatgctccgatccactcggattgtgcttattttctggttgtcacttgacaaccagtcattgcgcatctagtctcggagacacgaatgacccgcgccaggcacccaaggaaggagattgaggccgcactcaggcatgcagcgctgcatggctggcgtgtcgagcaggccaagggcaacggtcatgcgtggggccgcatctactgccccgacaaccacaaggaatgccgctgcggcgagttctgtgtatccagcgtctggagcacgccgaagaatccgggcaaccacgccaatgccatccggcggatcgtggacaactgctcgcatcagcgggaagtgacaacgctgcgcgtactgcaattcaggacatgaccatggaatacgccttcaccctcaaatttcacctgtcgcaggcggacggcgataccgatgtgctggtcgaacgcctggccgaggcggggtgtgatgacgcgctggtgggcaccggcctgccgggccgcgtggcgctggcgtttgtccgcgaggcggagtcggcgcgggcggccatggtgagtgccctggccgatgcccgccgcgccatgccatcggccacgctgatcgaggcggcgccggacctggtcgggctgacggatattgccgagatggttggcgtgtctcgccagaacatgcgcaagctgatgcttggctacccggattccttcccggtgccggtgcatgaaggcagcagttcgctgtggcacttgctggacgtgatcgtgtggctggggcagcgtggctacgacattaagccggagctccttgaaatcgcggccacggcgatgcaggtgaacctggccaggtgcgccagccaggtggcaccggcgatggcgcgggagttccggtcgctggtggcttagcggtcggccgtcgactccgcttcccggcccatccttttcgggtggtggtacgaatcccggcctttggccaagatgcccggacaaccgccctagccgggcaccacaaccagaagtggagacaagatggccgaatcagacgtgaaagccgtgatgggcgagttcttcgccgcctttgcccgcgcagacatggagcgcttcgccgcgtgcctggacgatgagttcgtctggaccctgcccaccggcgaatccgacccgcatggcctggttgtgcgcggcaaggctgccgccacggactacctgaagcagcgcttctttgcagacaaggccaatgcgccggtgctgtcggacgtcaagcttgagtacaccggtgatctggccatcatgcgctttcgcgtacaggtgccggccagcgatcagcagcacggccatcgccagccgcgtcgccaggcgggcgggcagggtgaccgccatcagcgtgccgagcagcgccatcggcaagcccagtgtcagcgtcagcccggtcgacccatagtgatgccgacgatcagcgacagcaggcccagcacccacagcatggccgtcatcagctggtctgcgcgacgatgcacgccttgcagcagcggggtgtgcggcgcggctggcgcagaaacggaactgcctgcggcacggcgggcagggatggtcgcggacagccgtccggacagggcgtggtcagcgctggtcatggttccctcgcagcgtaagtcaagaagacgctgcaccccgtccgcctgatggcttattgttttaatgtcttaatttatggcgttgcgcggctgattatatcgacgcctgcccgctgcaacaggctcggcccgcgcgccttaatccaacagcgccacctgcacgtcgcgcgtgccctggtacgggttgcggccgtgccagacctgcaggttgtccagcaccatcacgtcgccatcgcgccagggccagctataggtggtctggtcgcacagttggtcgatatgcgcgcgttcggcatcggtcaggcgttcgccattgcccagcgtggcgccggtcgggtacttctggcgcttgcgccgttccaggtcctgctcggggttctccacctgcggcagcatatgcaggatcgaccggtacagcttgcgtccggtctgcggatgtaccacgaacggctccagcgcattgagcacggtcaggctgccgtcttcatgccagactggttccagcccgcgctcggcgcacagccggttcacctcggccgggtcctcggtatggaacgactggttccagccgcgctcgtccatatgcgcgtaagaggcatcgtcggcatcgcgccgcggtccgaagttgatcgcggtgcggctgcccagcgtggcgagcctgccggccagttctgggtccatgcgctcggccaggtggcgcacatcggtgatcagggtttcgccgcccacctcggcggtcttgcgcgagaagaaggcgatgcggcgcgggtagtcgcggcggtaagccatttcggaatgtaccgccaggcgcacgctggccgacagccgcgtggcttccatcacgcggccgctgatggtttcgcgcggggcgcggccgccggcgtagccaccgtcgaaggccggaaactgctcgatgaagtcggcaaagtcctccgtgccggcggtcgggaagccgcgcagcacgatcccgccatgttccaggatcagcgcgtccagcgccgggcgcaccgtgcgcgaccactggcggaactgcgcgcggtccagcaggcgttcgccggccggttcgatgaacagcggcgggcggccgggctgcagcacgtggcagcgcacatcggggccaagggcgggaacggctactgcgaaggttgccgcatcggcggcggtggcttgggtcatgttgtctccagtcttgtgctcaggtcgaaggcggggtcagtgccggtaggacgggtcgatgtggtccagctcgcgccgcaccgccgcccattcgcggtcgccgcggatggctacgcggccgaaggccttgcggctggcttccagcgatgccggtgacggcatcaccagttcgccgccagccatggcatcgacctggatcttgcaggccgattccagccagtagatgttgaagaaggcttcggcgatggtgcgcccgcataccagcaggccgtggttgcgcaggatcatcgcgttgtgctggcccaggtcctgcaccagctggccctgctgggccaggtcgactaccgggccggagaagtcgtggtacgcaatgcgcccgtagaacatatgcgcctgctgcgacaccggcagcaggccgcaggccatggccgataccgccgacgatgcgcgcgtatgcgtgtgcagcacgcacagcgcatcatggcgcgcggcgtgcacggcggtgtggatcacgtaggcggcggggttcaggcccagctctccggcatcgcgctcgggccggtggacgatgtcgccgttcaggtggatcttgtacaggctggacgcgtttacttcctggtacagcagcccgtaggggttgagcaggatgtgctcaggctcgcccggaacgcgcgcggtgatgtggttgtagatcaggtcggtcatgccgtaccggtggatggcgcggtagagcgcggccagctcgatgcgggtggcccactcggcgtccgaaatggcggcgggacggatgggatcggtttcgctcatgcgatggctcctttgcgtgcgtagggctcagtccagccggatgccgagctcggccaccagccgcttgtcgctggcgaattgcgaagcggcgtagtgctggtagtcggcggtattcatatggcggttgggcatcgattcggattcgagcgcgcgcaggtaggcagggtccgatgtggcctggcggaaggcatcgtgcagcgtggcgaccaccgcggggtccagcgcgcgcgggccggcgatgccgatttcggactgcacggtgatgtcgtagcccagctcgcgcagcgtgggcacggcctgccagcgcttcaggcgctgcggctcggccacggccagcaggcgtaccttgccggcttcagccatggcgccccagccggcttcgatcatcacgtcgacatggccacccagcagcgcggacaacgcatcggcgccgcccttgaaggggatgaaattgagcttgatgccggcctgctgttccagccggcgcacggtgatctggccgagcgagccggtgccgaccgatgccacgttgaccttgccagggttggcgcgcgcgtgctcgacgaagtcgccaaagcgcttccaaggcgagcccgctggcaccgagatcccgtacacatagctggtcaggccgatgatgtaggtgaagtccttgatcgcgtcgtagttcaccggctgcaggtgcggcaggcggaacaacgccggtgtgatcagcgccagcgtgtagccgtcgcgcgccgcgctgcgcgccatcgcggcgggcccgagcgtgccgctgacgccgggctggttctggatcacgatgggctggcccagggtcttcgatgccgccaggcacagcgcgcgcatctgcacgtcggtggcgccgccggcggtgaagggcacgatcagggtgatggggcgcgcgggccaggcctgggcgcgcacggtggcgggcaggctgagcatggcagggaagagcgcggcggccggcatggccttgagcagtgtgcgccggcgggcgtcgggtgggcggggcatgtggtctccttgtctggtctgcggcagcgcgggcgggctggttgccggatgcgttcgaagcgtcccgtgtggtccgggctctgcgcgatcgccgtcctgtgctgcatgcggaaaagtctatggcgcatgtcggcgcgcattgatgccggcgcccggcaaaccgattccgaaccggaatcgcggactaaaatgccccggccaccgtcgcaacatcgcgctatatcggccaaccacaggaatcgctgcatgaagaccgaagacctcagactgttcctggtggtggccgagcacggcaacctgcacaaggctgccggcacgctggggctgacccagtcgtcgctgtccaaggtattggcgcggctggagggcgaggccggactgcagctgttcgagcgcatgccgcgcggcgtcatgctgacgccggtgggccacaagctgctggcgcacgcgcggcgcatcgtgctggccaatgacgatatggagaacgagatcaacgacgagcgccaggcgcgcgtcggccaggtgcgcgtggcgacgctgccgcacgtggtgccgtcgctgttctcgccgctgcttgagcagttcctggccagccggccgctggccaggttctcgatcaccacgcacctgagcccgcagctgatggccgcgctgcagggcggcgaggtggacctggtctgcgccgccatgccggacggcgaaaccgatggcgtcgagtacctgccgctgggcgcgctgacgctgcaggtggtggcgcgcgcggggcatccgcggcgcgcgcgcttccgctcgctggccgatctggtggacgagcactgggtggcgcccgccacctcgctctatgtgcgcagcggcttcgaggggcgcttcaccagccggggcctgccgccgccgcgcgtgaccgtggaaagcaccagttcgtcagtgtcattcgcggacctgctgcgcaacaccgacctgctcggcatcatgccgcagcggctgctgggccaggcggtggcgcagggcctggaagccgtggagggcgacggcatgtgctggcagtatgagctggccgtgttctggcgatccagcgcctacctgtcgccgctgtgccgcgacttccgcgacgcgctggtgcgctggtgcggggaagccggcatctgagccgatgccggcaacaccatgcctcaatccagccggatattgttttccttgatcacgttgccccagtacgcctggtccgctctggccgtcgccgcgaacgccgccggctgcgtcgtcttgacgatcagccccagctcggcgaggcgctggcggatgtccggcgcggccatcaccgtttccacatcggccgagaccttgtcgacgatggcctgcggcgtgccggcggtggtgaacaggcccagccaggccgggccgtccaggcccttgtagccgagttcctggaaggtcggcacatccggcagcatcggcgcgcgggtattgccggtgaccgccagcggctggagcttgccggtgcgcgcatgctggcgcaccgtcatcggcgacagcgttcccagcgagatctggccgccgatcaggtcggtggcgatgggggcttcgcccttgtacgggacatggaccagttcggcgccagctcccttgagaaagacctgcatatagagatgggcgccggtgccaatgccataggtgccataggaatacttgtcgggctgggacttggccaggctgaccatctgcggcagcgtgcgcggcatggcgctgctggcggtcagcaccaggctcgaggtgcacagctggcagatggcggtcaggtcgcgcagcggatcgaacggcggcttggccaccatatagggcgtctgcaccaggctgggcaagcccagcagcagcgtgtagccgtccgccggcgccttggcgaccacgtcggcgccgatcatgccacccacgccggggcggttctcgacgatcacagggcgctgccacagcttgctgagcggatcgcccagcgcgcgcgccagcacgtcggtggcaccgccgggcgggtagggcaccaccacccgcaccgggcgcgacgggtaagcctgctgggcccacgcccggctgattccaagagtcgaggcggtggctgccagggaacctgctcccagccagtgcagggctttgcggcggtcggcttgcatggtgtttcctccagtcgttgacatcgtgtcggtgcgcggtacgggtgcgccagggcgccagtgaccacggcaacccgcagcctacgaggcagcgccatggcggggcatcggcgggatggacgaaaagagtggggagtacttacccgggggcctgtgcgggagggttattgcggcagtgccgcaatccgagccgacgtttcccttatgatgggcgccgccgctgtctctgctgcttgcctgcctgatcccgtgcggcgtccgatccattttttgcttttccatcatggcccgcctcaaactcgacctgcctgccgaccagttctgctacgccacgcacctgaccgtgcgcgtgaccgacatcaactcggccaaccaccttgccaacgattcgatgatctcgatgatctccgaggcgcgggcgcgcttcctgtatgaattcggcagcgaggatgtgcggcaggaaggcgtcggcatcatcgtgaccgacctggccacgatgtaccgcaacgaggcgcatgcgcgcgaccagctgcagttcgaggtgggggtgatggacttcaacaagtacggcggcgacatcatcttccgcatcacgcggccggccgacggcacgctgatcgcgatggccaagtcgggctttgtcttcttcgactacgtggggaagaaagtggtggcgatgccggagggattcgccaagcggttcccgaaggtgaactggatggagtaatcgcctgcgtggcgctgtccttcaacggcgccacggttcctgcaagagattcggcttacgccttgcgctcgccgcccagcgcctcggtgaggtcgccgagcatgccggagagttcgccggccatcatggtgaaatcggcgtcgaagcgctcgtcttcatcatgcgccgtgccatcggcctgttccttgatcacgtccagcggcgccaccttcttcaccaccagcccgtcggtcagcacgaacgagacccggtcgttccacgtcatcgccaggcgcgtgcagcgcttgccggcggcgatatggcggcgcaggtcttccgggtccagcggatggcgcacgtaacggacggtggccttgctttccgcgccggactgcagctcgatttcctggtcgacggtgaagccgcccggtgccgcatcgccggccagccattcggtcatggctgccaccggcgactggttgacgtgcaggttgatcagcggcagcggatccagtgccttgaacagcatgccgcgcacttcatcggccttggccgtggcggcggcgtcgatggcaagccagccgttgtccgggtcgatccacacacgcgtgtcgcggcggatgctgaaggcgcgcggcagcagttcttcggtgacctgctccttcagttccttcatttgcttgcggcccggcttgtagccttgctgctcttcgatttccgcggcgcgggcgcgcgtgacctggttgaccacggtggtgggcagcagcttcttttcagtgcgcagcgtcagcagcatctggccgccgacggtatggaccagctggccgttgtcacgcggcgaggcccagccctgggtttgcatttcgaggctggtaccggggaagaaggcgtgcttcgccaggctggcttcgacctcgtcggcgctcagcgaccacggggcggagaaacgatggacctgcagattcttgaaccacatgggaattcggccaaagggacgaattctatcctctcgcggcgcacggccgcgaaaaaggagggcgccgcgcggcacgccgaccgcgcgacggtcaccgagaggcccgcccttacaggtcgagtttggtgatcttgctgccctcgaggctcaggcccgccatcaggcccgcattggtcatgacgaagccgacgatgggttgctgggcggtcttggtgtccagcacgccgctggcgccaaccgttgccacggccacggtggcatcgacgcccgcgacccagccttcgctgcgcacgaacttgtcatacgcgtcctgcgtcaggaacatcaggatcacggacttggactgcgcaccgatctgccagccgaccgagccggagaccaggcggtaataaccgcgcgtggcgccgcctgagcgcagggaaccgtcgccatactcgccgccgacgataaagccggccgacagcgtcttcgggaacaccaggatgccgcgcgcgcggttgcccagctcgcgcgagccctggaccgagctgtacaggcgcgacagcgtgccgtccacgccggagtccagctcacgccggcgcgcggccttgtcggtgggggcatcgggctttgtggtggtgcaggcacccagggccaggctgccgagggccagacccgcgctggccgaaaggaaggttcgacgtttcatctcgtctccttggtgttgttgtcgtctttgaagcataggcgccggaagcacccgggcaaatgccggaccgcgcagagacgtttccatttgtgacgaaggtggtgccgggaggccattcgcggcaagaatagccagtcttgcgcccggaacgtcccatggctgaacatgggacggcccaatgcgccgtgaccacatcatccagccatgaaaaaactcctgacagccctgccgctggccttcctggccgcgtgcgcttcacatccttcgggttcttccaatgatgccggcgccgcggctgccggatcgcagtcggccgtcgacagcagcggctggcaggcgctgcgcgccaaatacatggactgcgcccagaagaaggccaacgataacctgtcggccaagggccagcccaaggacgtggccaacctggcgctggccgcgtgcgagcctgagctgggcgccatgcatgattccttccgcacctacctggatgggcagatgtcgtcgtcgcacggcaagagcagcgcgcgccaggctgcggcgcgcgtgaccaccgacacccgcgagaaggcgcgcagctacctggtgcgctacgtcgagcgcgagcgctacgtggcccgcgtgccctgagggcacgcgcgcggcagcctggtcaaagcatttccagcgggcccgggccgtcgggcggcgggaagatgcggtcgagctcggccagctgggcggccgacagcgtatgcgacagcgcgcccaggttctccagcaggcgctcgcgccggctggtcttggggatggcgatgacgccgtcctgcgccagcagccaggccagcgccgcctgtgccgccgtcatgccgtggtcgcgcgcaaagcgcttcagaccggggttgcccagcaggcgtgactgctcgatcggcgaataggccatcaccggcacgccgcgctggcgcagccacggcagcaggtcccattcgatgccgcgccggcccaggttgtacagcaactggttgatggccagccggtcgccgcccggtgcgtcccacaactcctgcatatcggacaggtccaggttgctcacgccccagcggcggatcttgccgtcgcgctgcagcgcctccatggcctgcacggtctcttccagcggcacgccgccgcgccagtgcaataaatagaggtcgatgcggtcggtgcgcagccgcttcaggctgcgctcgcaggcttgcacggtgccgcgccggctggcgttgaagggatagaccttgctgacgaggaaggcctcgtcgcggcgcccggcgatggcctcgccgatcatctcctcggactggccctcgccatacatctcggcggtatcgatcagccgcaggccaaggtccaggcccaggcgcagcgtggcgatttcttcggcgcgcgcggcgcgcgactcgcccatattccacgttcccatgccgagcgccgggatgcgctcgccgtcgggcagggtgacttgcttcatgtgtcggcttcctggtttgccgggtcaggtgccgggcggcacccaaccacactagttaacaacacctggaatgtacaagccgcgcgggccgggattgcttcagaccagtccggtcagaaaatacaccgagatgacgaagaacaccgcggcggtcttgatcattgtgacggcgaagatatcgcggtaggactcgcggtgggtcaggccggtcaccgccagcagcgtgatcactgcgccgttgtgcggcagcgtgtccatgccgccgctggccatcgacaccacgcggtgcagtacttccagcgggatctgcatggcctgcgcgcccgcgataaaggtctgcgacatcgccgccagcgcgatgctcatgccgcccgaggccgagccggtgatgccggccagcgtgctgaccgagaccgcggcattgaccagcgggttgggaatcgcgcgcagtgcgtcgctgaccaccaggaagccgggcagggcggcgatgaccccgccgaagccgtattccgatgccgtgttcatcgatgccagcagcgcgccgccgacggcgcccttggtgccctcggcaaagcgctcgcgcagggcgccgaaggcggtcaccagcaccaccgcgatgcccagcagcagcgcgccttccactgcccagatcgcggtcacgctggcgatcttggtttccaccggcttgggcaggcccggcagcgccacgctgttggaagggccataccagagcgggatcatccgcgtcagccagaagttggccacgcccaccaccaccagcggcagcagcgccagcagcgggtgcggcagcttgccggactggctgcgctcgggctcgttgcgcaggttggtgccgtagccttcgccacgcgcggcggcggcgcggcggcgccattccaggtagctcaggcccaccaccaggataaacagcgagccggccacgcccagcaccggtgcggcccaggaggtggtgttgaagaagttggtggggatgatgttctggatctgcggcgtgcccggcagcgaatccatggtgaacgagaacgcgcccagtgcgatcgcgcccggcatcagccgcttggggatgttgctctggcggtacagctcggccgcgaacggatagaccgcgaacaccaccacgaacagcgacacgccgccataggtcagcagcgcgcataccgtgacgatcaccgcattggcgcgcgagcgcccgatatagcggatcgccgcggcgacgatggactcggaaaatccggacagctcgaccaccttgccgaataccgcgcctaataggaacacggggaaatacagtttcacgaagccgaccatcttctccatgaagataccggtgaacaccggcgcgaccgcggacgggtcggtcagcagcaccgcgcccagcgcggcgatgggcgcgaacaggatcacgctgtagccgcggtacgcggcgaacatcagaaaggcaagggctgccagcacgatcagaaacgacatcggatctccttcagggttgccttgtcctgaggtgcggtccgttgccgcgcggggcctggcgcttgtggcgccttgtctctgtcagtccgtcaggaaaagggatcagccggcgactttgccacagcttggcccgcggcgtaacctccggtctcgccgcgggggcactgggatgacagttgccggcatgaaggagatgcgccgtttcagccgtgctggtggcggtactcctgcgtgcgcccgccgtagccataggccgcggcgcgggcgtcgatcacgtgcacgtacgacaccggatgcagcttgcccagcagccccgacatggtctcgaacacggcctcgatgaactgcgctttctccgccttggtgttggtttcatcggtcacgctgatgtccaggtggaaggcgttgcggccctgctccgacagcggcacgtcggcgatgatccagctgtcgtgcgggatgtactggaccgtgacggcaatcacctcgcgcttcttgccgagcacgcgctcggtcaggtcggcgatcgccctggcgctgcggcgggtgaggtcggcatcgggttgaccggacaggtgcaggacgatgtggggcatggctggctccttggtttttcgtgggttggtgatgtcatggtagggggtggtgtagtatcggaaaagtgggaatattcgatgtgtgccatcggattatccgaagtaatgccacccttgccggagccttgccatgcgtggattcgaaaccgaccagttacgcacctttgtcacggtcgcggacagcggcagcctgtcggcggcggcgcccaggctgttcctgtcgcagtcgtcggtcagcgagcagctgcgcaagctggaggagcgcgccggcgtgccgctgctgtcgcgcggccggcatggcgcggtgccgacgccggcgggcgagcggctgctggaacacgcgcggcgcatcctggcgctcaacgagctggccctgcaggacctgcgcggccacgcgctggcgggcgaactgcggctggccgtgaccgactacttccgcccgggcgagatcgccggcatgttgcggcgcctgcgcgagcgctacccctacctgcgcctgcacgtgacggtgatgaagagcgcggcgatcgacgccgccgcggagatggacaccttcgatatcggcctcagcatgcgcctgccgggcacgcgcgggcagggcacgcgcggcactgtgctgcggcgtgagccgctggcctgggtagccgcgccggccgaggccgacagcctgtccgcgacgctgccgctggtgctgctgcccgatacctgctcgctgcatcagtacgtggtgcagctgctgctgcgcaagcggcttccgttcgagattgcgcactccgcgtcaggcgtggcggggctgcatctggcactggcggcggggcttgggatgtcgtgcctgaacgcctcggcgatcggccccggcgtggcgccgctggacgccgccaccattgcacggctggggctgccgcggctgcctgaggcggagttcttcctgctgcccgcgcggcgcggggagtcagcgtttgtagccgaggcgcgcgatgcgcttgccgggcagctgggctaagagacgggcattcagtacgacacctcaagtcggggaatggatcacaagacggactgtggcaaccgccacttgtgtcgaaagcaacatatattgatcgcgaataggaataattcgcaatctcgttgaccctggcaatcctgtaatcgataatgcgcccgcgttttcaaaactattacagccgattacagggaaatgagaataaaacttcacccgatctgtgccgcggtggcggggagcttcgtatttcaaccggtgctgacgtgggcccaggccgcgccaggcgcttcggcgcagttgcctgaggtcacggtcagggccgatgtcagccgcgagcttggcaccggctataacccgcccaatgcggtcagcgcgaccaagaccgaggcgccgctgcgcgacatcccgcagaccgtcaacgtggtcaccgccgatgtcatgcgcgaccagcacgccacttcgatgcaggatgcgctgaagaacgtgccgggcgtgtcgttctcgcacggcgacggccagcgcgaccaggtgtcgatccgcggcttttccgccatcgccgaccagttcgtcgacggcatccgcgacgatgcgctgtacttccgcgacatgtccaatgtcgaccgcgtcgaagtcatcaagggtcccgcggcggtgctgtacgggcgcggctcgtcgggcggcctgatcaaccgcgtgaccaagaagccgggcatcgacgtcaccgacttcgcactcagctacggcatgtgggccgaccgccgcgccgaagccgacgtgggccgcgtgtttggcgacggcgccgccgccttccgcgtgaccggcgcggtggagaaggccaacagctaccgctcgcagcagttcctggaccgctcggcgatcgcgccgtcgctggagctgcgcatcgctcccgaaaccaccgtgctgttccaggcagactacctggaagaccgccgcgtgaccgacttcggcatcccggcctacaagggacgcccggtggacgtgccggcctcgcgctactacggcgcggccaacgcgcgcgatgccgactactcgcagtcgcgcgtgttctccggcaccgccacggtcaaccatcgcttcaatgagaactggtcgatccgcaacgctacgcgctactaccactactcgctggaccgcaacaacacgctgaccaacacggtgaacgaggcggcgcgcaccctcaccatgaaccacggcaatgtccgccgcgaggaacatggctggttcaaccagaccgacctgacccagaaggccaccttcctgggcatgaagcacgagatcctgtacggcatggagatcggccagcagaacaaggaccaggtcaacaacaccaagccggtggtcggcgccaacggcctgccgatcgctttcgacctgttcaacccggtgttggtggcgctgccgcgccaggcacccggcacgccgggcacgtcgaaccttggcgtgttcaataccctggcgttctacacccaggacatgatcaccttcagcgagcagtggaaggcgctgctgggcgtgcgctacgacaacttccagcaggagacgcagacccgcatcgccggccagcgcaacctgtcgcgcaccgacaccgcctggagcccgcgcgccggtctggtgtggcagccgtcgaagtcgcagtcgtactacgtgtcctggagcaagtcgttccagccctccggcgaggctttcgcgctggcggccaacaatgccgacctggcaccggagaccaccaacaacaccgaggtgggcgcaaagtacgactggctgaacggcaaggcgagcacgacgatctcggtgttcaggctggagcgcagcaatatcaagatcgccaacgccaccaacacggcgctgctgccgatcggcgaacagcgcaccgacggcatcgagatctccggcgcggctgaactcggcggcggctggcgcatgctggccggctacgcctacctggatgccaccgtcaccaagtccaccgccgcgctgcagggcaagcgcgccaccatcacgccgcgccactccggcaacgcgtggctgaccaaggacctgggccacggcttcggcgttggcgccggcctgaacctggtgggcgcgcgctatgccgacccgctgaacaccgtgacgctgcctggctatgtcaccgccgatgcgatggcctggtaccgccgcggcgccttcgaggcacagctgaacctgtacaacctgttcgacaagggctacatcgtgtccgcgcatggcaccagccccaacctgaacatgccgggtgccccgcgcagcgtgatggccaccctgcgctaccggatgtaaagcgcagcatcgtggacaaaaaaaccgggcggtgatgaaccgcccggttttttttcgactgccgtttctcgttcggcggggacacgcaacggcatgccccggagaaaccctgagtcccgcgccgtgccggcagggtcagtggtcgcgttcccaggtctgggtgcggccgatcaggctgatgccgatgaagccgcgcacgttgagcttgttgccgtcctcggccagcgacatcttgctcttgtagaccttgccgttctccggatcgaggatctcgccgccgctccactcgttgtcgccggtcttgcgcaggccggagaggatggtcatgccgatgacgggctggtccttgcgtgcgtcggtgcacttgtcgcacacgcgcggcttgccgtcgctctcgacgaaggtcttgaccaggcgtccgctgaagacgccgttcttctcggtgatctccaccagcccgcgcggcttgccggtgttgtcgtcgatggtcttccacatgccgctgggcgtggcctgcgccatcgccgcggcgctgccgagcagggttgcggcgatcacggcggcgcgcagggtcgaagcaaggggggaatggatgcgcatgatgtctcctttgaggttcgtagccacgccaatctactggcgccgggggcgcgccgcaatccggcgcggcgcggcgcgcgcctttccgcggccattgcctgctacccggaaagccgcatgcagccgccgtttgcgggttattgtgatgcagcaaaaggcgccggcgggcgggcgctgaagcaatcctctaagcggacgtacgacgcgctgccggcagggcgaggcgagtggcgcgcagagtcgcgagggggagagcgcgaacacgcgaggcacggcgcgcgcgatccggatcgctcggcaagcgcgcggatcgaacacgcatgccgatggcttgatcgaagcgtctgccgaagtgttgccgcgatgcttcgccagcgtcgcggcttggctcgatcgcaacgctttgatgacctcgcgatgccttcgcgctgttgcgtcgatgcaaaccgttgcgtgcacgcatcactcttggatggtgtgtgcgacggtgtcgcgcgaagcgcgaagcgagcatggccgaggcctggtcgcataacggcgcgtgcgtgcgctgacgactgtgtaaagcatgcagggcgtgtgtcgcgcagcgcggcgcgcgcgcgatcaggaacgtgtccgcgccagtcgaaggctgccgcacgcgtatcggtgcatcgcccgcaaagcctttgtccatgcggcttttcggaaaacgcgatgacgcgcgcagcggcattgcgcagtcgtcaggcgcgcgttgcgatgctggtcgtccgggtttgtcgcggcgtgtaaaagctgcgatgcgcggtgcgtgcgatggggtgtcgcgctgcatgtgcgagcgtgcgaaacgagcgtcggcaccagcgtgcgagcgacgcgttgcgatgctatcggcaacgtcttcgtgaccctgcgcgtgagaactagttcgagcgatacatgcaggcaagtttttttgcacttttttcttaacatcatcgtgcaaacgaattatgattcgccttgacaagagtctcacttcattgcagagaagcaggaagcaagatggaacgacgagcgcgatgcgcgcttcgatgcagtgacgaaggtagtagctgaggagcacgagaactttgacgcagaccaggccggaccggcttcttaaaacgcgtgcagtctcccttggtccattaacgggttggacccgctaccaccgaatgaatgccgtctgccgtgcgcgaggccaagcccgcaccgcgggccagctgtccgatatctcctcatttctggccgtgcgccggctcaacgggcggtgcgggctgatcgaatattccagggcgcggcacgtgcccgagacccgcttgcgggctcgctccggccgccaagtcaccgccaggggcggtgcgcctgcaaccaaattcattagcgtgcagcagtggtcgggccgcacgccgatgaatcgctcgctcgactggggccgcgctgctgtagtgcgcctcgggtcggtcgggtcgccaacttaggtcattcgatattcactctctagtgaaggagttatccatggcaactgctgcaaagaaaaagccggcggctaagaaggccgccaagccggccgccaagaaggctgctgtgaagaaggtagccgccaagaaggcagcaccggccgccaagaaggcaccggccaagaaggccgctgtgaagaaggtcgccgccaagaaggccgcaccggccaagaaggcagccgccaagaaggccccggccaagaaggccgcggtgaagaaggtagccgccaagaaggtcgcgaccaagaaggttgcagccaagaaggctccggccaagaaggccgcggtgaagaaggtagccgccaagaaggtcgtggccaagaaggctgtcgccaagaaggctccggccaagaaggctgcagtgaagaaggttgctgccaagaaggctgcgccggccaagaaggctgccgccaagaagccggctgccaagaaggctgctgccaagaagccggctgccaagaaggctgccgccaagcctgccgcggcccctgccgttgctcccgcttcggctgccaagaccgcgctgaacccggctgctgcctggccgttcccgacgggcaaccgtccgtaagctgcttcgccacggagtggaccttacacgttccgcaaggaaccgcaccggcacgcagcgcgtgcccgcatgaccggatactgcgtatccggtccgcaagacaccaggtcttgccgacccgccgatggcatccgcccggcgggttttttcatgggcgcgcgcccgcgcgcggagcggtccgccgcaatgttacggaattgcaaagccgaaaaaaagcgccgcgacccttgcaggtgcggcgcgttctgctgcgccctggcgcggccctgcggggccgcgagggctcagtgcgtgacccgggtcacgccgcccgaggacagcagccgtacgcgttcgccagggcggaaggcttcgtcggcctcctgcgtgatcgcgcgcatctcgccgttgtccaggcgcacggtgatttccagcccgcggcgctggttgatcttgttctcggccgcgctgccggcaatgccgccgagcaccgcaccaaggatcccggccgccaccgcgccgttgccgccgccgatggtgctgcctgcggcaatgccgccgatggcaccgcccgcgagcgtgccggcaccgctctggccaccctggatggtgacctcgcggatgccttcgaccacgccgtagcgcacggtctgttcacgctgcgcctggcccgtgccatagacgctgttggagttggattgggtagcgcagccggcaaccagggcggtgacggcaaggacggcaacggcaccgccacgtagcttgttgttcatgtcgtttcccgagaagaagccacgcgctggccgcaggtcaggcgtagcggtacccgaatgcagactggaaccggttgccgatttcctcgcgcgacaaccagtgattctgcggaccctgttgcgcgatcttgaccgaacccatcagcgatgccaggcggccagtcgtttcccagtctaatccgttttcaatgccgtagagcaggccgccacggaaggcatcgccacacccggtcgggtccacgatgcgctcggccgcaaccgccggaatcgcgtactggcgaccatcggcaaagatgctggcgccgcgctcgccgtgcgtgacgatgaaggcacgaaccttggcggcaacctcggcgctggtccaggcggtgcgggacagcaggacctgcgcctcgtagtcattgactgtcacgtaactggcgagttcaacgaactcgcgcaggtcttccccgttgaacaggggcatggcctgacccagatcaaagatgaacggcacgccggcctcggcgaactggcgcgcgtggtgcagcatgccctcgcggctgtcgggcgcgacgatgcccaggcccggcgcgctggcgccgcccagcgcatccttgacgtggttcagctgcgactggctcattgcgccagggtggaaggcggtgatctggttgttgtccaggtcagtggtgatcatggcctgcgccgtgaaggtctccggcagcacgcggatgtggccggtggggatctccagcttgcgcaggtagtccagatagggttcggcatcggcgccgacggtggccatcaccacgggatcgccgcccagcatcttcagcgtgtaggcgatgttgccggcgcagccgccgaactcgcggcgcatgccgggcaccaggaacgagacgttcagcatgtggatctggtccggcaggatgtgttcacggaagcgtccatcgaacgtcatgatggtgtcgtaggcgacggagccgcagatcaggctggccatgctctctccaggtgttggggtgattggtggaatggagcccttgcgggcagtatcggtcgggcagaaaacaaaaagcggccgccccgggatgcgggcggccgctgccgcccgggaacccgcgggttcccgggcgtgccgctgatttacttcagcgcggccagggctgcgtcgtagtccggctcggtcttgatttccggcaccagctggctgtacttgacggtgtcgttctcgtcgagcaccaccacggcacgtgcggtcacgccggccagcgggccggacttgatgtccacgccgtagttgcccttgaactcggcgccgcgcatggtcgacagcggcaccacgttggccaggccttcagcggtgcagaagcggcccatggcgaacggcaggtcggccgagatcgtcagcaccacggtgttggcgaggccgctggcggcttcattgaacttgcgcgcggaggcctggcacaccggggtgtccaggctcgggacgatgttcagcaccttgcgcttgccggcgaagtcagccagcgtgacgtccttcaggtccttgccgaccagcgagaaggcgggggccttgtcgccggcttgcgggaacttgcctgcgacttcgatggcgttgccgccgagggtgacgttgctcatgtctactccttgttgtctgatggatttccggttcgtgtccggagcggggggcgcggcctgccgccggactcggatccggtccggcggcgggccagggattcaggggtaaaaaatcagcacgcgatagttggccggcgcctgctgcgtccggaatcgtacccgaaccggcagctccatgcccgcgcgaagaccctgcgcggcaaaggccttttgcgacggctccaggtactccgcgggttgcagcacgcggcgcagcagcagctggtcctgcaggtcggtcatcaccagctcgatcgcgggcagggcggtgctggcgcggcccaggttgcgcagcgtgaccgacagcaggtaggtgtcgccgtcttcatcctggcgctgcagctgcgaggtctcgatgcgcagcgcatcgatgtcgcgccatggcggcacgtcgcagcccagcggcgcgcaggcggcctcgagtgccgggcgcagcatcgggaactggccggccagctggctgcgtgccaggtagaccacttgcacggcagcggcgatggcaagcaccacggcggccacgcgccaggcggagcggggcaccgtcacgggcttgcggggctgccgttcgcgctcgcgctcgcgctcgcgctcacgcgcgtggcgcaggaagtcgggggcgaagaccgggccggccggtgcttcggtgcgtgcccagcggcgcgtggtctgctcgcgcgcgacggcgccgccggtgacgctggacggctgtccggtgtcgggggcgttgtcgtcgtcgccaacggtgggtgaggtgggcgcggcaggcgaggtggcaaggcgggccgatgcctcatccggccatgcggtcggctcggacccggcatcggcagacgccgcgcgcaggaactcgcttgcgctggggatgttggcagcgggtgccactggcacgggcttggcgtcagcatcagccggttgcggtgctgccggtgccgccgcagcggccggggaggggggcggtgcggccggggtatcgagcgcgccgtgatcgagtgccggccaggcggacgcggacgccgcttgtgccggctgtgccggcgcatcctcggcgggttccggtgccgtgacgggggcgggcccggccgcctccgggccggcagcctggcgttccgcctcgcgcgcatcgcgatgggcgacggcttcgttggcttcgcgcagcgcctgctcgatctctacgtcttccatgccggcgggtgccggcatggccatgtcctccggcgacgacatcagcatcgtcggcgcatccagcgccggcacgtcatagccggggtcgatggtcggggtgaaggcaggctgcggcgcaggcgcggctttagccaatgcgggcgccgccgagggggcgggaggggtggccggcgaagcagccgccgatggcgccgatgacgccgatgatgcagcaccggccggcagcggaatctcgatcaggtgctcgcgcgcgtcgaacaccgtttcgcactggccgcagcgcaccaggccctggcgcaggcgcaactggtcggcgaccagccggaaggcggtacggcaggccgggcagcgcgtgactagcttgacggcggccatcggtgtgaatcagggttgggcgccgcgggtgccatgcaggcacacccagccttcctcgctgcgccacaccgtcagcggcagccagggcgcgtaggccgcggcgacttcatccgcctggcgttccagcacgccggacagcaccagccgtccgccggcgcgcacgcgcgcgctcagcatggcggccatcagcttgagcggattggacaggatgttggcgaccaccaggtcatagctggcctcggacaccgattcgggcagcgcgaacgaggcttccacgcggttgcgctcggcgttgtagcgcgacgcttccaccgcgttgggatcgatgtcgatgccgacggtatcgccggcgcccagcttgcgtgccacgatggccaggatgccggagccgcagccgtagtcgagcacggtttcgcccggcttcaggttctgctccagccactgcatgcacagccgcgtggtgggatggctgccggtgccaaaggccaggccggggtccagttccagcaccacggcatcgggctcgggtgcatcgtgccacgacggcaccacccagatgcgctcgccgatgcggatcggctcgaactgggattgcgtcagccgcacccagtcctggtcctcgaccgcgcgcagctggtaggccggcaccgggtcgatgccgagctggttggcggctgccgccaccaccacggccggatcggcatcgtcgccgaacagcgccaccacgcgcgagcggttccacgcgagttgcttcggttccagcccgggctcgccaaagagcggctgctcgtcgggcgtgtcggcatcggcgtcttccaccgagaccgacagcgcgccgaggtcgaacagggcatcagaccaggcttcggcctggtcctgcgccacttcgatcacacattcctgaaatgccacgggcttccttgcttgctgcttgtgtattgcggataacgttgcgttgcgtcaggccttcgcgcgctccgccaggcgatgctcgagatagtggatgctggtgccgccttcaacgaagttggcgtccatcatcagctcgcggtgcagcggcacgttggtctggatcccgtccaccaccatttccgacagcgcgatgcgcatgcgggcaatggcctgctcgcgcgtggcgccgtaagtgatgatcttgccgatcatcgaatcgtagttgggcgggacgaagtaaccatcatacgcgtgcgagtcgacccgcacacccgggccgccgggcatgtgccaggcggtgatgcggcccggcgacggcgtgaacttgaacggatcctcggcgttcacgcggcattcgatcgcgtggccacggaactgcacgtccttctggcgcaagcgcagcttctcgccgaaggcgatgcggatctgctcctggacgatgtcgatgccggtgatcatctcggtgaccgggtgctcgacctgcacgcgcgtgttcatctcgatgaagtagaactcgttgttctcgtacaggaactcgaacgtgccggcgccgcggtagcccatcttcttgcaggcctcggcgcagcggtcgccgatgcgctcgatcaggcggcgcggaatgtgcggtgcgggagcttcctcgatcaccttctggtggcggcgctgcatcgagcagtcgcgctcgcccagccagatcgcctggcggtgctggtcggcgaggatctggatttccacatggcgcgggttctcaaggaacttctccatgtagacctcgggattgccgaaggcgcggccggcttcttcacgcgtcatgttgacggcgttgatcagcgcggcttccgtgtgcaccacgcgcatgccgcggccaccgccgccgccggcggccttgatgatcaccgggtagcccacgcggcgcgcggtggccaggatttccttggggtcgtcgggcagggcgccgtccgagccgggcacgcacggcacgccggccttgatcatggcttgcttggccgacaccttgtcgcccatcaggcggatgctgtcggcggtcgggccgataaagacaaagccggatttctccacgcgctcggcaaaatcggcgttctcggacaggaagccgtagccggggtggatggcctgcgcgtcggtcacttcggcggccgagatgatggccggcatgttcaggtacgacagcggcgacggggccgggccgatgcagacggcttcgtctgccaggcgtacatacttggcctctttgtcggcctcggagtacaccacgactgtcttgatgcccagttcgcggcaggcgcgctggatgcgaagagcgatttcgccgcggttcgcgatcagaattttttcaaacatggtctctctctgcgagaacagtagcggtcccgctgcgcgccgcaatggcacgccgggcgcgcggcccgggggctgtcgccgccgcggccgccatactgcgcggaactgcatggaactgcacggaacgggccgcgaagcccacaacgtccctggcgccaaacaacgccattgcatgccgcgcgggcgctgctgcgggggccacttgcgtggccggtggcagcgtgcggcgtggcatgccggtcaggatcagccgatcacgaacagcggctggccgtattcgacggcctggccgttctcgaccaggatttccttgatgacgccggccttgtcgcactcgatttcgttgagcagcttcatggcttcgatgatgcagacggtctggccttccttgaccgagtcgccgacgttgacgaacggcgcggcacccggcgacggcgcgcggtagaacgtgcccaccatcggcgaggtcaccacgtggccggcgggcagctgggcggcggcgggctctgcagccggagccacggcaccggcggccggtgcggcggccgcggcgggcggcagcgcctgcatctgcggcatggccatcggcgcggcgacgatttgcggcggttgcttgacgatgcgtaccttgccgtcgccttcggtgacttccagctcggagatgccggattcggccaccaggtcgataagcgtcttcagcttgcgcaggtccatctttttatcctcctgaatcgggttatccggccgcgctgcccgggacgggccgcggcggaagaatcgtgttgccggccaccggaaatccgcgcccgccgtgccgaggcacgccaacgggcgcaggccgccgggcggcgcgcgcaggttgttgaaaaaatcttgggagttcagctccccgaactctcgggtggcggctgctcctggcccagcacatagtccagcgccagcaggtaaccctgccagccaagcccgcagatcactccgaccgccacgtcggagaaataggagtggtggcgaaagctttcgcgccggtgcacgttggacaggtgcacctcgacgaacgggatcgccacgccggcgagggcatcgcgcagtgccacgctggtatgcgtgtaggcagccgggttgatgatgatgaactcgaccccttccgcgcgtgcggcgtggatgcggtcgaccagtgccccctcatggttggactggaacgtatccagcgaaacgccggcttttgccgcgcgttcggccagggccgcgtcgatgtcggcaagcgtcgtgtgcccgtaggtttccggctcgcgcgtgcccagcaggttcaggttcggcccatgcaggaccagcaccttgcggtagcgggctgagcgacggatagagcgggttgcagtcacggcggctcgaccagatcaacgaaattgcgcggagattaccgtagcttagagggatttgtctagcgcgcgatacaaggcttggcgaccttgcgcggcgctttggcggccctttaagcactttccggcagttttggcgcccccgggaaacaaatcgctgaagaaaaacgaaattcagcgaatttggcggaagaatagctcaggctcgtggcagcactgcccgcagttcctcggccgtcacccgtcccatcttgcggtacttgaccgatccgtccgggttgatcaccaccgtgtagggcaggccgccggcgctgttgccgaagttgcgcgacagctcggtgccggcaaaaccggccacggcgagcgggtaggccaccgggaccttggtggtgaactgctggatattggcggctgaatcgatgccgatgccgacaaactccacctggcggtccttgtattcctcatgcagcgcggtcagctccggcatttcctcgacacacggcccgcaccagggcgcccagaagttgatcaccacggtcttgccgcgcagcttgcccaggtccaggtcggcgccggcggcgtcgggcaggcgtgtctggaagaaggtttccaccgcctggtcgctggcgggcttgggcgagaacacgaaatggccggccagtgcgccagcggcgcaggcaaccacggccacggcgatccacagccagaggcgggagcggcgggcgggcgaggaaacggtttcagtcatgggatggcttggaccagtgaagtggggcgggccgtcaggccgggtcggcatcgccgggcgcgtccaccagcgcccgtaccgcctgcaggtcggcgcgggccgggcgccccgaggcgtcggcacgcacggcgccgcgttcgtcgacggcatcatacagtgcaatatgaatgccgactggggcacccagttccgcgcgcacctcgccggcgaggagccgcgcctcgcggcggtcgggccactggcccttccacaggaagctgagggtctcgacctcgccgcggccgccgaaatgccggctctcgctggtctcgaagtccacgccggcgttgatcaggtacagtgccgcgtccttggcgctgtcgcagaagcactgcagatagatatcggagtgctcggtggcggtgccgttgagcacggcgccgaccaggtaaggccggaacggcgccaggtcttccatggccagcaccgccagccggcgcagcagtgccagcacgcggggctggctgtcggcgtggaacagcgcctggtaggcgcgcacttcggcttcgacctgttcgttgtcgggcagccattcgccgggcacgcgctgctcgcccagcacctggcgggtggccttgcgcttggcggtggcgtagtcggcaccgtcctcggcgatcatccgggcggcagcctgggcgatttcctcgcgcaggcgggtggggtcgggggtggtgcgtcgggtcatgccccatgataccggacgctcccgcgcaaccggtgcgcgcgctgccgcagtgcagcgaaggccgcgggcgctcgggtacaatcggaggcttcctgcccggccaccgcaccgcaagacacggcctgaaacagccgccgtgccgccgcgccacgccgggtgccgaatccccacgcctgcgggcttcaagtctttccgggaacccatgcatattcatatccttggcatctgcggcactttcatgggcggcctggcggtgctggccaaagaggccggccaccgcgtcaccggctgcgatgccaatgtctacccgccgatgagcacccagctcgaggcccaggggatcgagctgatcgaaggcttcgaccccgcgcaactgtcgctggagccggacctgttcgtgatcggcaacgtggtctcgcgcggcaatccgctgatggaggccatcctcgaccgcaacctgccctatgtgtcgggtccgcaatggctgggcgagcacgtgctggcgcgcaagtgggtgctggcggtggccggcacgcatggcaagaccaccaccacgtcgatgctggcctggatcctggaggatgccggctacaaccccggcttcctggtgggcggggtgccgcagaacttcggcatctcggcgcgcgtgaccgaatcggactttttcgtgatcgaggccgacgagtacgacaccgccttcttcgacaagcgcagcaagtttgtccactaccgcccgcgcaccgcgatcctgaacaacctggaatacgatcacgccgacatcttcccggatctggcggcgatcgagacccagttccaccacctggtgcgcaccgtgcccggccagggccggatcgtcgtcaacggcgtggaggaaagcctggcacgcgtgctggagcgcggctgctggagcgaagtcgagcagtttggcgtgggcgactggcgcgagagcgatgccgccgccactgcggcgcccggcaaggatgctttcgacgtctggtttggcgacgccgttcagggcaccgtggtgtgggacctgcagggcacccacaaccgcatgaatgcgctggccgcgatcgccgccgcgcgccatgtgggcgtgccggccgcgcaggcgatcgaatcgctgtcccgctttgccaacgtcaagcgccgcatggaagtgcgcggcgtggcgggcggcgtgaccgtctatgacgatttcgcccaccatccgaccgcgatccagaccacgctggacgggctgcgccgccgcgtcggcgatgcccgcatcctggcggtgctggagccgcgctccaacaccatgaagctgggcgtgatgaaggcgcaactgccggccagcctggagcaggccgacctggtgttcggctacggcgccccggccggcaaggacgcgctgggctgggacctggccggatcgctggcgccgctgggcgacaaggccgccgccttccaggacctgggcacgctggtgcaggccgtgcgtgccgcggcgcagccgggcgaccacgtgctggtgatgagcaacggcggcttcggcggcgtgcaccagaagctgctggacgccctgggccaaggcgccgcaagctgaccagcgggaaggaccaccatgctgctgtacctgcacggattccgctcctcgccccagtcgttcaaggcccggctggtgcaggagcgcatgcgcgagtggggcgtgggccgctactacgcctgccccacgctcaatgtctcgcccgaaatggccattgcccaggcgcaggccgcgatccgcgccgcgcaggccggcggcgaccaggagatcgccatcgtcggctcgtcgctgggtggcttctatgcccgctggctgggcgagcgccatggctgcaggaccgtgctgctcaatccggccatccatccctggaccgacctggaagcgtacctgggcgagcagccgctgtggcacggcggcggctcggtcacggtcgagcgccgccatctgcaggaattgctggacctgcgcgtggacaccattaccgatcccggacgctattacctgctcgccgccaccggggacgaagtgctggactaccgtgagatggtcgcggcctgcccgggcgcaaacatccgcgtgatcgagggcagcgaccacggcatcagcgaatttgccgactacgtcgacgatgtgctcgccttctgcggctatggccccggcggcaaggtgccggcgggcacaggcccggcatgagcgcgcagtccgcgcgccgctgcagctggagcccgcacctggcctttgatgcagccatcacgcccaacctgcggcgctgggtgaccggtgacgacggctcgctgaccgcgcgcctggtggcagcatcggagcgctttcgcgtggcgcgcctgctgcagcgcccgcagcgcccgctcgccgatgaatggcaggtgctgggccagcacgaccgcacccccgcgctgacgcgcgaggtgctgctgatctgcgacgatattcccgccatatttgcccatactgtggtgcgccagcgccatgcgcgccgcgactggccgttcctgcgcgggctgggcgagcgcccgctgggcggccggctgtttgtcgacccggcggtggcgcgcgagccgttccagtttgcgcggctgctgccgcaccatccgctgcgccaggccttgcagcgtgtgctgccggccatggcgccactgcccatgctgccggcgcggcgctcggtgttccggcgcggcgacggcgtcatgctcgtgacagaagtgttcctgccggacctgctgtcgcggccatccccggggaccgaggcgattccgtatcccaggtatttgcggactacagaccgaagcccctctacacacactaccgaaaccaagaaagagaccacgagatgaaactgcagggtcgggttgccatcatcaccggtgccgccgccggcatcgggtttgccaccgcgcagcgctttgccgccgacggcgccattgtcgtcctgtgcgacgtgcaggaagcgcgcgtgcgcgaggccgccgacaagctggccgccaccggcgccaccgtgtcggcctaccgcgtcgacgtgacccggcgcgacgaagtcgatgccatggtggccgccgtgctggccgcgcacgaacgcgtcgacatcctcgtcaataacgccggcatcaccaaggatgcacgcctgggcaagatgaccgaggcccagttcgatgccgtcatcgacgtcaacctgaagggcgtgttcaactgcgcgcaggccgtggccggcctgatgagcgagcagggcaagggcgtgatcctgaacgcttccagcgtggtcggcctgtacggcaacttcggccagaccaactacgccgccagcaagttcggcgtgatcggctttaccaagacctgggcgcgcgagctgggccccaagggcgtgcgcgtgaacgcggtgtgcccgggcttcgtcaataccgagatcctgcagaccgtgccggaaaaggtgctggacggcatgaaatcgtcgtgctggctgcgccgcctggccgagccggccgagatcgccagcatctacgccttcctggccagcgacgacgccagctacgtcaacggcgtggcgatcgaggccagcggcggcatgtcgctctgaactgcgtgggtgcacgcaccccgccggggcgccggcccccgcaggcgccggagcggggtgcggtatcattccacgtctcaggccgtatcgatacggcgtggcccgcggccagcgatttgcacgccgcgcgccgcactcgcttccgttcgcacgcatttgcgcccggttgcaccatttctcccacaggacccgccccggcgctgcctcttggcggccagacgcggttccgcgcatttctgaaagtaccgatcgatgcagttgctgttcgaagaaggcggcgaaatccgcgccggcaccgtgctgaaccagcagggcgaggcttaccaggtggagctgccagccggcaagcgtaccaaggtcaagtcgcgcgacgtgctgctgcagttcgcgcagccgtcggcaatcgagctggtgcgccagaccggcgacatgatggccgagatcgacctggacttcctgtgggaatgcgcgcccgaggctgaattcggcttcaccgagctggccgccgagtactacggcgccgagcccggcccggtgcagcaggcggcgctggcgatggcgctgcacggcaacccggtgtacttccgccgcaaggggcgcggccgctaccagcgcgcgcccgaagaccagctcaaggcggcgctggccgcgctcgagcgcaagcgccagcaggcgctggtgcaggccgagtacgaagagcagctcaaggcgctgacgctgcctgagaccttccgcaacaaggtgctgcagctgctgttcaagccggacaagaacagcctggaatacaaggccatggacgccgcctgcaccgcgctgggcatgaccccgatgcggctgatggtggccgccggcggcgtcgccagtgcgcgcgcgctgcatgaggccaagttcctggccgagtgcttccccaagggcacgggctttccggaaaccgacgtgcccgagccgcccgccgacctgccggtggccgacgtggaggcattctcgatcgacgacgtcaccaccaccgagatcgacgatgcgctgtccgtgaccaggctgcccgacggcaagctgcgcatcggcatccatatcgccgcgcccgcgctgggcattcgccgcagcgaaccgctcgatgcggtcgcgcgccagcggctgtccacggtctatttcccgggcgacaagatcaccatgctgcccgacgccgtggtggagcgctacacgctgcaggaagggcgcacgtgcccggcgctgtcgctgtatgtgacggtggacccgaccgtgtggctgatcaccggcagcgagacccgcgccgagatggtgccgatcgccgccaacctgcgccacaacctgctcgacgatgtcatcaccgaggctgcgcttgccgcgggcaccggcgactacccgttccgcgacgcgctgacgcagctgtggcactttgccggctacctgtacgacgagcgccagaaggcgcgcctggccagcggcctgcgccctgagacccacaaccgcgccgacttcaatttctacctggacgaccaggccgacggcagccagcgcgtgcgcatcgaacagcgcaagcgcggctcgccgctggacaagatcgttgccgagctgatgatcctggccaacagcacctggggcaagctgctggccgacaacggcgtgccgggcatctaccgcacgcagaaggcgtggggcatgcaccgcacccgcatgcagacctacccggcaccccacgagggcctgggcgtggcgcagtacgcttggagcacctcgccgctgcgccgctatgtcgacctggtcaaccagtggcagatcctggcggtggcccagcacggcgtgaccgccaagctggtggcgccgttcaagcccaaggacgccgacctgctggccgcggtggcggacttcgaaggcacttacgccgcctacgccgaccaccagtcgaccatggagcgctactggtgcctgcgctggctcaagcaggaaaagcgcgagcgcatggtggcctcggtgctcaaggaaggcgcggtgcgctttaccgagatcccgctggtcacgcgcgtgcccgaactggtgcaggcgcagcgcggcacgcaggtgctgctggagatcggcgagaccgacgagatcacgctggaagtgtcgtgccgggtgctggagatcttcgccggtgaaggcgaagtgcccgaggaagagctggaaagcgacgaggaagccgcggagctgtccgccgaagccgctgccgacgcggccgccgaggaagcggccgagcaggccgccggggtctcggacgaagccccggccgaagcgggcgacgacgatgccggcgcggcgtcgggcgagcgcgacaccggcaccccggcggtcggctgaagccttcggaaatcggcggcgctcacttacaatgcctgtctgatccggggtccgcggccccggtcttgccaggccgccggcccggaccggttcgggccgccgcccacccttcagccaccctccatccatcgtgaacgccacactcgccgctccccgccactggtggcatgccaggtggcacaacagcagtacgctggccaaggcgctggccatttccgtggccgtgcacgtgctgctgctgatggtgcgggtggccgcgcccgaggtgttcgagatcaagcgcagcgatgccgcgctggacgtggtgctggtcaatgccaagtcggcgcagaagccgcgcaacccgaccgcgctggcgcaagccaacctggacggcggcggcgaccatgacctgcagcgcgccaccacgccgctgcccgcgcagacccagacgcaggaaggcgacctggtgcgccaggtgcagcgccgcgtcgagcagctggaacaggagcagcaacgcctgctgacccagtcgcgcgaggccgcgccgtcggtgcgcaaccagccgctcaagcccggcgagaagcgccaggacaccccgcagcgcggccaggacgagcgcacctcgaccgacgagatggccaggctggaggccgagatcggccgcaacctggaccactacgccaagcgacccaagcgcttccagctgaccgccaccagtgcccaggcggtcgactatgcgcagtactacgaccgcctgcgccacaagatcgaggcgcgcggcaccactgacttcccgcaacgcaacggcaagccgctgtacggccagctgatcctggtgatcaacgtcaaccggctcggcaagctcggctacaaccgcgacggctacaacgtcgacgccatcgacgtggtcaagagctcgggcgatcccgcgctggaccgccaggccgtggcgatcgtgcgcgcggccgcgccgttcggcccctttaccgccgagatggcgtcgcgccaggacatcctcgaagtcatttccactttcaagttttcgcgcagcgggctggaaacccgcttgcaggcacgctgatgacatccactgattcttcccaagctacttccgaccgctatgtggtgatcggcaacccggttgcgcacagccgttcgccggcgatccacgccgcctttgcgcgccagaccggcgaagccgtgcagtacgaccgcctggaggcgccgctggacgggtttgccgatgccgtgcgccagttctttgccgagggcggctacggctgcaacgtgacggtgccgttcaagctggaggcctatgacctggccgaccgcctgaccgagcgcgccgaggctgccggcgcggtcaacacgctgtggatcgaagagggcctgatccacggcgacaacaccgacggcatcggcctggtgcgcgatatccaggacaacctcgacacgctgatcgaaggcaagcgcgtgctgctgctgggcgccggcggcgccgccatgggcgcgatgctgccgctgatcgaatgccggccgtcgcgcatcgtggtggccaaccgcaccgcgtcgcgcgcgagcgacatgctggaagagtttgtcgaagccgccgaccagtatggcgtggagctgtggggcggcgggctcgatgcgctcgacgggctgtccgaggacgaagccgtcgacgtggtgatcaacgcgtcgtccagcagcctgcatggcgaagtgccgccggtgcccgagttcctgctgggcgaaggcgtgctggcctacgacatgatgtacggcgccgagcccacggtgttcctgcagttcgccgcgcgctgtggcgcgcgcaccagcgacggcctgggcatgctggtcgaacaggcggctgaagcgttctacatctggcgcggcgtgcgcccccgcaccgcccctgtgctggccgagctgcgcgccgcgctgcaggccgaacgcaagggctgaccggggcgccgccagccgtggccaaccgcaaccgcgcagccagcgccagccgcggcgcagcccccgcacgcacggtgttcaacccggtccgctggctcggctacctgctgggctgcgtggcggcgggcgtggtggcgatgcagctgtacttcttcatgcagatcgcaagctggcaatacatcaatcctacgacgaccacgttcatgcgcgccgagcgctggcgcctgtgcggcatcaacgtctggaactgcggcatcgaccggcaatgggtgccgtacgaccgcatctcgcgcaacctcaagcgcgcggtgatcgccagcgaggacgccgacttcgtcaaccatccgggctatgagctggatgccatgctcgatgcctgggagcgcaacaagaagcgcgggcgcatcgtgcgcggcggttccaccatcacgcagcagctggccaagaacctgttcctgtcgtccgagcagcactacctgcgcaagggccaggagctggccatcacgtggatgctcgagttctggctggacaagcagcgcatctacgagatctacctgaattcggtggagtggggcgagggcgtgttcggcgcgcaggccgcggcgcagcactacttccgcaccagcgccgacaagctcagcgtgggccagtccgcgcgcctggccgcggcgctgccggcgcccaagtgcttcgacaagaaggaatactgcgccaacgtgcgcgtgaatttccgcgccaaggcggggatcatcgcgcggcggatgggggcagccacgctgcccgactgagggcttgctcccctctcccacttgtgggagagggagcaaggcagcggcagattcagcgcctcagctcagccaccccttcctgcggaaatacaccagcggaatcgccgccgacacggccatcagcgcaatcgcccacggatagcccgcgccccagtccagctccggcatgaacttgaagttcatgccgtagatgctggcgatcagcgtgggcggcatcagcgccaccgacaccaccgagaacagtttgatgatcttgttctggttgatgttgatgaaaccgacggtcgcgtccatcaggaagttgatcttgtcgaacaggaacgcggtgtggttctcgatcgagtcgatgtcgcgcaggatctggcgggcctcgtcctgctgctcggccgacagcagctggctgcgcatcaggaaggacaccgcgcggcgcgtgtccatcacgttgcggcggatgcgcccgttcaagtcttcctcgcgggcgatggtttccagcacgtcggccgcggcggcatcggtcacgttctcggccagcacgcggcggctcgcttcttcgagccgctcgtagatttcctcgatcgagtcggcggaatactcggcgtcggtcgcgtacaggtccatcagcacgtccttggcattgcgcaccgagcccgggcgcatgcgtgcgcgcagccgcaccagccggaacaccggcaggtcttcgtcgtggatggagaacagcacgtcgcgcgtcagcacgaaagccacgcgcacgttgcgcgacaaggcctcttcctcgtccagcaggaagtcggtgcggatatggatattctcgtcctcgccctcgaaatatcgcgcggacgcttccaggtcgcccaggtcttccagttcgggaagggcgacgccataggcttccttgatccagttcagttcctcgtcgtcgggattgacgacatcgatccagatcggcttgtgctgcagcagctcattgcgctcgtcgacctgctcctgggcaagccggcctttctgcaggacgaacaggttgatcatccccgggattccttattgctgattgcgacgaaaaacaaagacaagcgcgaagacaagcgcaggcggctcgccgcattcccaggtagtccgtcatgccctgcatggcctggcgagacgccggaaggcgccctgccagggccgggccacgggcaagcgtgatcgcgctgtaccgcggctgccgttcggcacggcggtacaaggcgatggcgtttgcctgggttggctggctagccgggagagggaagatccgcacgcgatgcggcgcgcatggatggcgccgccggtggcacggaaagacactcgcccgcagtgttctgctgcgggcgaggccgacgaggcgcggagccgggtgctccgggcgggtcgtcgttacgcagcccgcagtgacatggcattcgcagaggtcgcagcgctgctgcggcaactcgaacacccgatgctactgcccacgtaatttctccgggattgtgatggccgcgagtgtagcccaacgtagggtggcttgttaagtgaaatctccgcgcacgcggcccgctgttgcccgctcacgaccggcggcgcgcccacccggcgatcagcccggcgcgccctgcaaccggcgccaaagcagcggcgccagcatcaccgaggacagcgccaggaacatcagcacgatcgcggcgtagtcctgccagtgcggctgctcgcccagcatccacatgcccgagaacacgccgaccaccggaatgaacatgatcgacaggctcgacaccaccggcggcaggctgcgcgccagcccgaaccagaccaggtggcagaaggcgaagaccaccaccgcgttgtaggcgatggcgccccattcgacggcggtgggcatgcgccagccgtcttccagcagcagcgagccgaccgccaggaagggcagggtcacggccagcatccagaacgtcatggcgccgatgggcacgtcggtcggggtgcgttttatcaattgggtgccgaagccccagccggccgcggccagcagcatcagcagcgtgccggccgggctgccggtcagcgcggcgagctcgccggaaagcagcagcaccgtgccggccagcgcgcagccgatgcccagccaggcccaggcgccgatgcgctcgcggaagaacaccaggccccagaccactgcccagatcggcatggtgtagcccaggatggcggcccggcccgaggacagcatcttgaccgcgcagatcgcaaacaggtgccagaccaccatgttgggaatggccaggcggaccaccgtgccccattcgcgccgcggcagggccagggaatcgccgcgcagccgcaacgccagccccagcgccaccagcccgcccgccatgcacagcaggcggaagcccagtgccggaaagtgcgctacgcctaccttcatgatgggccagttgatgccccaggcaagcgtgagcacgacaagcaggaagataccgcggcgatcgagagacatgacgggacgcggctgtgcgtcatgccgcgctttgttttgagaggaagcgcaaaaccatagcacgtagcgggtaaaattgccggaagcgacatatgctgcagggatgaaaggttttcacgccgctgtggccaaccgcgccggccgggccaatggggcgccggcgccaccaggatattccgagtacccatgactttcaccgagcagcttgctgccgcctggcagcgcaacgattccctcctgtgcgtcgggctcgatcctgacccgcagaagctgccgctgtccctgaccggggcgggcggcgccatcttttcgttctgccgcgagatcgttgacgccaccgccgacctggtctgcgccttcaagccgcagattgcgtacttccactcgcagcgcgccgaagaccagctcgagcagctgatccactatatccacgatgcccaccccggtatcccggtgatcctggacgccaagcgcggcgacatcggctcgaccgccgagcactacgcgctggaggccttcgagcgctaccatgccgacgcggtcacggtcagcccgtacatgggcttcgattcgatgcagccgtacctggcctatccggatcgcggcgtgatcgtgttgtgccgcacctccaacccgggcggctcggacgtgcagttcctgcaggttgacggcaagccgctgtaccagctggtggccgaggccgcgcgcgagcgctggaacaccaccggccagatgggcctggtggtcggcgcaaccttccccaacgagatcgcgcgggtgcgccagatcgtcggcgacatgccgctgctgatcccgggcatcggcgcccagggtggcgacatcgaggccacggtcaaggcggggcgcaccgcggacggcaccggcatgatgatcaactcgtcgcgcgccatcctctacgccagccgcgagaaggattttgcggcggcggcgcgcaatgtcgcgctgcagacgcgggagaccatcaatcgctatcgccacggctgaaaccgggcgtagacaataaaaaaccgcgccagaaacggcgcggttttttattgggcggaggttgctgggcgccggcctcaggcctcgttccggatcagctccagcagtccccgcatggcatgctcggccgcctgccggcggatctggccgcggtcgccgcgaaagcgctgggtctcggtatgggtggtgatgcggttgctccagccgaagcagaccatgcccaccggcttttccggggtgccgccgttgggcccggccacgccggtgatcgacagcgccacctgggcgcggctgttcagcagcgcgccttcggccatggcgcgcgccacttcctcgctgaccgcgccgtggtcgcggatcagcttggccggcacgcccagcatggtggacttggcctcattggaataggtgacgaagccgcgctcgaaccagccggacgagccggatacatcggtaatggcggcagccaccagcccgccggtgcaggattcggcagtggccagcatcagggatttgtcggcaagggcgacgccggcctggatggcgagctggtcgagcaggcggctgacagacatggtggatacaggtagttttgaggggaatcagcttgcaatggctggcgatacgggcttagaacgagcgccacagcgcaaacaccagcagcgtgtagaaggccgcgaagatgtcgtcgaacatcacgccaaagccgccgcgcaggcccgggcccttgagcgtgcggtcatagtggccgatcggcgccggcttggtgatatcgaacagccggaaccacaggaaggcggcgaactgcccccagaagccggtcggcatgacaaaggccagtaccagccagaaggcgacgatctcgtcccacaccatgctgccatggtcgtgcacgcccatgtcgcgcgcggtgcgcgcgcacgcccacaggccgaccaggaagccgccggcgatgatccacagccaggtggtgggctcgatccacagcgaaatcactacgaaggacagccacgcgtagagcgtgccgaccgtgcccggcgcaacgggcgacaggcccgagccgaagccgaaggcgatcaggtgggccggatgggccagcatgaagcgcgcgctcgggcgcgtgaccttgacggtctggccggcttccagggtcagggcggggtcgcgcggcgcggccccgggaggcaaggtggacatcaaaattggctcgtgtgatgcagatactgcttatggttatggccggcttgcgctgccatgcttgcgggactcccgtgcccgcgcagcgcgccgatgccggcatcatgacatgcccgcgacccggtgtcagggggcagcgaagtggtcgaagctggcgccttggtaccgggtcgggttgccggtactgtcgaccagccgcaggccgggctcgggcgtgatcgcgccgacacgtgcgagcggcagcgccaggcgttcgctaatcgccgcaatggcgtcgcggctgccggcgggcgcggtgaagcacaattcgtagtcgtcgccaccggccagcacgcattcgcgctggatggcatcgggctggctggccagcactgccgagcgcggcagcgcatcgacgtcgaccagcgcgccgacctgcgagcgttccaggatatggccgaggtcgccgaccaggccgtcggaaatgtcgagtgcggcatgcgccacgccgcgcagagccatgcccagcgccacgcgcggtgtcggcgtgtccatgcgcgggcgcacctggctgaactcgggctcaggcagcagccattcgccgcggcagtcgcccagcgccaggcgggcgtcgccaagcgtgccggaaatccagatatcgtcgccgggccgggcggcgtcgcggcgcagcgcggcacgcagcggcacgtcgccgaataccgtcagcgaaagcgtcagcgggccgcgcgtggtgtcaccgccgaccagttcgcagccgtgggcgtcggccagcgccagcatgccgtcggccagttcggccagccaggcggggtcggcctcgggcagggccagtgccagggtgaaggcgcgcggctcggcgcccatggcggccaggtcggacaggttcacggccagggccttgtggccgagtgagcgcggcgccacgtccgggaagaaatgccggccgctcaccagcatgtcggtgctgatggccaggtggtggccggggcggccctcgatcagcgcgcagtcatcgcccacgccgagcgcggccttgcgcaccggccgcgtgaaaaagcggcggatcaggtcgaactcggaaagcggggctggctgggcgtgggacatcgtcgtcaggaagattcgcccgccgggtgggacggatcgggggctgcgcgttgcgcgaagatgaatggcgatccggggcaatcccgcggcgcgtgcgcagcgcgtcaggatggggcgcgtccggcatttcagcaagatactgccgcgcacgacagccatgaccatcgcgcggtacgccgcttctgccggcaggcgctacgcttgctggtattgcccggggggatggggcatattgtaccgaatcgcaaaggtgccccaagtaaaaggcttattgtgaaatagtatttcactatataaaatgctgggttccaaaggaagagaagggcggacacgtggagccggtccgccgatcgtcccccgcctcgtcaatgacggctccaccgattggaagatgcgccgatgaccagccctcagcagtccccgtcccaagacgatctgaaacagcagcagcgtgaggcgctgcgcaaagcggcgctcgagtaccacgagtttcccacccccggcaagatctcggtcacgccgaccaagccgctgtcgaaccagcgcgacctggccctggcctattcgccgggcgtggccgccgcttgtgaagagatcgtttccgatccggccaattccttccgctacaccgcccgcggcaacctggtcgcggtgatcaccaacggcaccgccgtgctgggcctgggcgacattggcgccgcggcttccaagccggtgatggaaggcaaggctggcctgttcaagaagtttgccggtatcgacgtgttcgatatcgaagtcgatgagaaggacccggaaaagctggtccagatcatcgccgcgctggagcccaccttcggcggcatcaacctcgaagacatcaaggcaccggagtgcttctacgtcgagcgcaagctgcgcgagaagatgaagatccccgtcttccacgatgaccagcacggcaccgccatcgtggtgtccgcggccatcatcaacggcctgaaggtggtcggcaaggacatcaagaaggtcaagctggtggcctcgggcgccggcgcggccgcgctggcctgcctggacctgctggtcgacatcggcctgccgatcgagaacatctgggtgacggacctggccggcgtggtctatgagggtcgtaccgagctgatggacccggaaaaggcgcgcttctcgcaaaagaccgacaagcgcaagctggccgaagtgatcgacggtgccgacatcttcctgggcctgtccgccgcgggcgtgctcaagcaggacatggtccagcgcatggccgacaagccgctggtgctggcactggccaaccccaacccggaaatcgcgccggagctggtcaaggaagtgcgccccgacgccgtgatggccaccggacgcaccgactacccgaaccaggtcaacaacgtcctgtgcttcccgttcatcttccgcggggcgctggattgcggcgccaccaccatcacgcgcgagatggaaatcgccgcggccaatgccctggccgaactggcgcgccaggagcagagcgacatcgtcgccaccgcctatggcatccaggacctgtcgttcggccccgagtacctgattccgaagccgttcgacccgcgcctgatcgtcaaggtggcgccggccgtggccgaggccgcgatgaagtccggcgtggccgcccgtccgatcgaggacatggacgcctaccgtctgcagctgcagcagttcgtgtaccactcgggcacgctgatgaagccgatctacgccgccgcgcgcaaggtcgagatggataagaagcgcatcgtcttcgccgaaggcgagcaagagcgcgtgctgcgcgcggtgcaggtgatcgtcgacgaaaagctggccaacccgatcctgatcggccgcccggccgtgctgcagcaccgcatcgagcgcttcggcctgcgcctgcgcgccggcgtggacttcaccgtggtcaaccccgagcacgatgagcgtttccgcgactattccgacgcctattaccgcatgatggcgcgcgagggcatcacgcccgagtacgccaagctggaaatgcgccgccgcaccacgctgatcggcgcgatgctggtgaacaagggcgaggccgacggcatgatctgcggcaccgtcagcaacaccgcggcgcacctgcgctatatcgaccaggtgctgggcggcaccagcaaggtctacgcggcgatgaatggcctggtgctgccgggccgccagatcttcctggtggatacgcacgtcaacgtcgacccgagcgccgaagagctggcccagatcacgctgatggccgccgaggaactgaagcgcttcggcatcgagcccaaggtcgcgctgctgtcgcactcgaacttcggttcgtccgaagcgccttcggcccgcaagatgcgcgaaaccctcgccatcctgcgcgatcgcgccccggacctggagatcgacggcgaaatgcacggcgacagcgcgctcgaccagaagctgcgcgaccagctggtgccggatggcgcgctcaagggcgaagccaacctgctggtgtgcccgaacatcgacgcggccaatatctcgtacaacctgctcaaggttgccgcgggcaacaacgtcgcgatcgggccgatcctgctgggcgtgaaggcgccggtgcacatcctgacgccgtcggccacggtgcgccgcatcgtcaacatgacctcgctggtcgtggtggatgcctctgccaagcgctaaaccgcttggtatggccggtagccggccaatgtgacgaaaagccgggttcgcccggctttttttgcgtccatatgtgcatggttagtatgcgcacacatacgcttaacatattgaaacaattgaagaattaccgctgccgccgggccgggattgattaattgcgtgcatgcgcgtaaccttacgcctttgatacaggcgctcgccatgagcgccccggtgcggccggcatccatcgcgctcctctacgggtggcgcagggcgctggccagggtggcccggacagatcgtctacccaaccagcggcaggctcgatttccggttcaaccaagacaagcaacgtgggtttccaagtttctctgatgcggcacgcatcgcgcatgctggcccggtccatgaccggcgcggcgctggtgctggccctggcgcagccgacgctggcgcggcaggtgcagaccgaagggatgggaaccattgcagtgcagcagttgcccaacgatgcacggcagaccctggagcgcatcgaagccggcggcccgttcctgtatgacaaggacggatcgagattcggcaactacgaacgcatcctgcctcaacgtgaacgcgggtattaccgcgaatacacggtcaagagcgccaggagccggaaccggggagccaagcggatcgtctgcggcggagaacaacgcgctgccaacgattgttactacacggaagatcactacaacagcttcaaacggatactcaaatgatgactgacattttcggattgggcgacgcccttgccgcccgcgaagagcgcggcgccggagatggctggcagcgggctcagcagcaggcccagaacctatacgacaacgtgctgatgatgccgagccaggagctcatgcaaaaactcccgcccgcgaccgcgcccgtggccatgcccgccggtcccggttggaacgacggcaccagcgagggggccatgaacctgttcaagacggtgcgtccgaacatcgtccagtcgatccgcgccttccgcgtgcctgagctggcccaggcggccgccgatctcgggcagcatttcctctatgccaattgcgcccattgcgcgagcaaggctgaggtcctggaaaccatcgccacgtcgttcaccttcccgaagcacttcggcaagaacttcgacgcgctggctgactgcctgaccgacatgatctacaaggcaggcccgcagccgggctttgtgatcgtgctggaaggcttgccgatcgcgcagaagttcgacaaggaagggcgcgaggtgctgctcgacgtattccgcgacgctgccgagttctggggcgagcgcaaggtgcagttccgggtgttctattcgttcgcctgagagcactgcctgagcccttgcaaggcgaatcaagcaaaaagcccgcaattgcgggctttttgctttccggcggcgaggtgctggtcctattcctgcgccggcagatgcccatgcggcgtgaggcggtcgatcagttccggcaatccttcgctcagttgcgcggccacgtcatcctgcgacatgccggtggtctgtgccagcgattcgagcgcgccggtgtcgcccagcgcgctgctcagcgccgacggcgtgaccggctggttggcgccgctgccgatccacgagttcacctgttcgcccagcccggcctgcgccaggatctgctgcagcgcgccgatgccgccggcggccgcgcccagtgcctggctgttggccggggcgccaccctggccgccaagcagtccgcccagcagcgagccaaggtccaggccgccggtggcgccgccgggcgctgcgccggcaccgccgccgccgagcatgccgcccagcagcccgccgaggctgcccagtccgcccaggccgtcatcgacaggcgccgcatcgtctgcttgtccgcggctacgcatggccagcgttgccagcaggccaagcgccatcatcagcttggggtcgagccctccggtactgcctgcctcgccacgcgcgccgccgagttgtccgagcacaccgcccagcacgctatcgagtagtcccatggtcgactcctttcagtcagggttgcaaggttgacgcgatgaccggatggccgccgccgtcagaatccgccaagcaaggcgttaagggttgccaggcatgccagcccggcggtttcagtgcgcaggatgcgggggccgagcgacacgccggtgaaacccacctgtcttgccgcctgctcttcgtcgggcgccaggccgccttcggggccgatcagcagcgtaacgccgccggccagcaagctttcgcgctgttcggcgatgaacgctggcagcgaatgcgtggcgcgcggcgataccagcagcctggcaccgccagccgcggactgcgccagccatgtctcaaagttagcgaccggcgcaacctccggcaagcgattgcggccgcattgctcgcaggcggcctgcaccagcgcctgccagtgcgcgtggcgcttgtgcgcgcgctcgcccgacaggcgcaccaccgagcggctggcctgcagcggctggattgccgtgacgcccagttcgaccgccttttcgatcagccagtccatcttgtcgccgccggccaggccctgggccagcgtgacacggaagggcggctcggcttcggccgcgtcatgcgcgccgatgcgcgccagcgcgtggcgcttgcccagctcgaccagcgtggccgcgtggctgccgccgcggccgtcgaacagcgtcatggcgtcgcccggcaccaggcgcagcacctgcacgtggcgcaccaccggctcaggcagcggaaaatcggattcggcggccaggacggtgtccgtgccgccgacgaagaagcgtggtgccatcagcttgcctggcctgctgcctgttccagcggcttgccgaagccccagcggtagccgtcgggatcttcaaccatgcagtagcggtcgccccagaactggtcggccggcgccatcaggctgaccgcgccggcgtcgaccgcgcgctggtgcatggcgtcgacatcgtcgcaatagacatagaaggtctgcgggcactcgacgcccagcgagcgcggcgtgcgcgcggtgctgccccaggcgccctcgggcgcgaacatcaccaccagttggccctggtagtgcatctcggcgtgggtcggcacgccgttttcgtcgaccacgttgccggccgtgaagccgaaggcgcggctgtagaagtccagtgcggcgcgcccgttggcgacggtcaggtagggggtgagccagggggtgttggccggtctggtcatgatcgtctcctgagtgcgggaaacccggcgcggctggcgtgccgcgcggtgcgagagtgcatcttacgcgtgccgcgctacgctgtcgaagtgcggcgcagcggtgaagctggcgctggcggggtgaagcatcaggcatgtgaggggccggatagttccggtgccgggggcggggccgtgccaggcggcctgcggtgatcgcgcggactgcgccgcgggggctgtccgggagtccggaaaaccccctagcttctgctaaaattgcggttttcctgccgtcaccgtcaggctcacgcccgctcacgtccaagaccgcccgcatgtccgcccttgcccatcccgccacaagcccttttgcttcccagcccgccaagctgatggccgacgccatccgcgtgcttgccatggacgccgtccagcaggccaattccggccaccccggtgcaccgatgggcatggcagacatcgccgtggcgctgtggggccggcacctgaagcacaacccgggcaacccccagtgggccgaccgcgaccgcttcgtgctgtccaacggccacggctcgatgctgatctattcgctcttgcacctgaccggctatgaactgccggtggaagagctgaagaatttccgccagctgcacagcaagaccgccggccacccggaatacggcatcaccccgggcgtggaaaccaccaccggcccgctcggccagggcatcaccaacgcagtcggcatggcgctggccgaacgcctgctgggtgaagaattcaaccgccccggctacgacatcgtcaaccaccacacctatgtgttcctgggcgacggctgcctgatggaaggcatcagccacgaggcctgctcgctggccggcacgctgaagctgaacaagctgatcgcgctgtgggacgacaacggcatctcgatcgacggcgacgtggtgcactggttcaatgacgataccccgaagcggttcgaggcctacggctggaacgtgatccgcggcatcgacggccatgacgttaccgccgtcgacatggcgatctcgcaggccaaggccagcgacaagccgaccctgatctgctgccgcaccaagatcggcaagggcgccccgaacaaggaaggcggccacgacgtgcacggcgccccgctgggcggcgccgaagtgctggccacgcgcgaggcgctgggctgggcccacgccccgttcgaagtgccggccgaggtttacgacgcctgggacgccaaggccaacggccaggcgctggagcgtgcctggaacgcgctgttcgatgcctacgccgagcgccacccgtatgaggccggagagttccgccgccgcatgaagggcgaactgccgggttcgttcgacgccgcagttgaggcctttatcgccaagtgcgaggaaaaggccgagaccatcgccacccgcaaggccagccagaacaccatcgaggccttcggcccggtgctgcccgagttcctcggcggttcggccgacctgaccggctcgaacctgaccaactggtcgggcagccaggccgtgcgcgtggatgcctggggcaaccatatcaactacggcgtgcgcgagttcggcatgagcgccgtcatgaacggcatcacgctgcacggcggctacatcccctacggcgccaccttcctgaccttctcggactacagccgcaatgcgctgcgcatggcggcgctgatgaagatccgctcgctgttcgtgttcacccatgactcgatcggcctgggcgaagacggcccgacccaccagtcgatcgagcacgttgccagcctgcgcctgatcccgaacatggatgtctggcgcaccgccgacaccaccgagaccgccgtggcctgggccgaggcgatccgccgcgagaacggcccgagctgcctgatcttcagccgccagaacctgccgttccagcgccgcgacgacgtcacgcgcgccaatatcgcgcgcggcggctacgtgctgcgcgacagcgtgaacccgaagaccaaccgtccggacgccgtgattctggctaccggctcggaagtcggcctggccgtcggcgccgccgatgcactggccgccgaaggcgtgcacgtgcgcgtggtgtcgattcccgcgaccaccgtgttcgacaagcaggacaccgcctacaaggccagcgtgctgccggccggcgtgccgcgcgtggcggtcgaggcgggcgtgacggacttctggtggaagtaccaggtccaggcggtggtgggcattgacaccttcggtgagtcggccccggccggcgtgctgttcaagcacttcggctttaccgtcgacaacgttgtccgaacggtaaaggacacccttatctaagcatccgggcgctggagccgcgtggtgcgccgcgcggcccgtgcggcgcccaccggtttcaatcgatcctcaggagagacagtcatgaccatcaagatcggcatcaacggcttcggccgcatcggacgcatggtgttccgcgccgcagtcgccaacttcaaggacatcgaagtcgttggcatcaacgacctgctggagcccgactacctggcatacatgctgaagtacgactcggtgcatggccgcttcgacggcgaagtgtcggtcgacggcaacaccctggtcgtcaacggcaagaagattcgcctgaccgcggtcaaggatccggccgaactgaagtggggcgagatcggcgccgatgtggtggtcgaatcgaccggcatcttcctgaccaaggaaggcgcgcagaagcacctcgacgcgggcgccaagaaggtgatcatgtcggccccgtccaaggacgacaccccgatgttcgtgtacggcgtgaaccacgagtcgtacaagggcgaggcgatcatctccaacgccagctgcaccaccaactgcctggcaccggtggccaaggtgctgaacgacaagtggggcatcaagcgcggcctgatgaccaccgtgcacgctgccaccgccacccagaagaccgttgacggcccgtccaacaaggactggcgcggcggccgcggcatcctggaaaacatcatcccgtcgtcgaccggcgccgccaaggccgtgggcgtggtgattccgcagctgaacaagaagctgaccggcatgtcgttccgcgtgccgacctcggacgtgtccgtggtcgacctgaccgtcgagctggaaaagtcggcgacgtacgaagaaatctgcgccgagatgaaggcccagagccagggcgcgctcaagggtgtgctgggctacaccgaagacaaggtcgtcgccaccgacttccgcggcgatgcccgcacctcgatcttcgacgccgaagccggcatcgcgctggacggcaccttcatcaaggtcgtgagctggtacgacaacgagtggggctactcgaacaaggtgctggaaatggtccgcgtcgcggccaagtaatccggcagcttccgcagtaaaggaaaacgcgccttcgggcgcgtttttcattttccggcgctgtgatattcagccagccgggcggggcgccagtgggcgcgcgtcgattgcgtcgccgtccaccaggaaatggccgccagccacatggtggatggtgcgcagcgcatcatggccgtcgaaatgccagcgcccgttgctgaacacgcgcgagtccgcatgagcggccacgacttcgccaaggaacaggtcgtaggtctgctgcgtggccggctccggcagcagccggcattccagccaggccgcgcagccctccagcagcggcgcgcccaccgccgtgccggcaaaggtgccaaggccgtaggcgtcgaacttgtcggtgccttcctgctccatcagcgccaggcccgagctggagcccagtgcctcggtcaggtcgacctggctgacggtggggacctgcaacacgaactcgccgctgtcttccagcaggtgccgggtccaggtgctcttgtccagcaccactgccaccttgggcggggcgaagtcgagcggcatggcccaggcggcggccatgatattgcgcttgccgccggcggcggcgctgaccagcacagtggggccgtggttcagcaagcggtaggctttcgggagtgatacgggcaggcggaaatgttcaggcatgatggccgggatgagccgtcagaaaagaatgataaaaatgggaacggcggacccactatacccggatgtacgagtgcatgttgcggcgcgggaaatgttcacatatgcggtcaattgtggaaaaagagcgcaatttttcagaaatatggcgtagacggccatttcagaaatgccgaatttgctttccgagcttgttttttcctcttacactattaagacgccgttgaaatctgatgtgcagccagtgcaagtggtggggccatctagctaagaataatctgaccgaggcctgatcatggtgaacgtagacacgaagcttttagtgatcttcaccgaactactgagcaagcgaaatgccacttatgtagcggaaaagatgcatatgaccgcaccggccgtatcgcactcgctgggcaggctgcgtgaaatctttgacgatccgctcttcatccgcgtcccgcatggcctgacgccaacgccgcgtgcgctggaactgggcccgaagatccgcgacatgctggacttgtggtcgtcgatcaacgagggcgatgccgacaattttgatccggccattgccaccggcacgctgagcatcggcttcgctgctgaactgggcgacacggtattcaaccgttttgtgctgcgtatcaagcagctggcgccggacctgcatatcaagctggtcgaatcccattcgtgggaaacggacgtcgcctcgatgcgcgccaatgaacttgacctggccttttcgccgttcccgacacgccacccggaaatcgtcgaggaaatggtgacgtcgctgaacctgtgggtttgcgcgcgcaagagccatccggtgctcaagaaccactgctcgctggagcaatacctggattgcggccatatcttcatggcgcattccggcggctccggccgcccggcgccgtcgctgattccgctcgactacgcgctgcagcagcgcgggctcaagcgcaatgcgacgctgacggtacattcatggcgtgcccaggccgaactggcctcgcagaccgacatgatcttcaccgtcaatgcgctgaccaaggacatggcctgcgagacctatggcctgcgagacctatggcctgaaggccttcccgctgccgtcggaactgaacaccatgctcggcctgaacatgttctggcaccgcagccgcaacacccatccgatgctggtgtgggcgcgcaacctgttccgccaggtggtgggcgagtttgtcggactgccgccggcacgcccggcacgggtggtcaccgaacaggacctgcaagacctgcaggcaccctgagcagcatcctgcggcgagcagcccaaacaaaaaaccggcgcctggcgccggttttttgttgcccgtctgcgctccgcggtggagcgtgcaggcttatcgtttgggtctgtggggacagtctgttttggtgcaattgccgtacagcgacagtgcatgttcctgcagcgtaaagccgcgctcgcgcgcgatgctttgctggcggtgctcgatttcagagtcgaagaactcctcgacgcggccgcagtcgaggcacaccaggtggtcatggtgcttgccttcgttgagttcgaaaatcgccttgccggattcaaagttgttgcgcgagagcaggcccgcctgctcgaactgggtcagcacgcggtagacggtggccaggccgatgtccatatgctcgttcagcaggatacggtagacgtcttccgcgctcaggtgccgctgctcactggtctgaaaaatttcaagaatcttcagcctgggcacggtcgccttcaggccgatgttcttgaggtccgccggactcggcatgtgggtgactccctagagtacaatgactggatagttgaatcataagggttttggcagcaaaagtcgctcgcggtagtgatgtcccaggtcgacgtcacgcgcccggcacggttgccgtcccatgtggttgtcgcggcaggcgcaacaaggcgtgtgtggtgcaatcggcgcatattgcgccgtttttgtgcccgctttgcggtaccgtgccgcggtacttttctttccctcccggaagcgagatacatgcgttctatccgttcgtccgccatgcgcccgacgctggttgtccccctgctggccgcggccctgctggccggcgcctgctcagcctacgattccacctcgcgcaaggtagccaacgccatcacgccgtaccggatcaacatcgtgcagggcaatttcgtctcgcgcgaggccgtatcgcaactgcgcgaaggcatgacgcgcgaccaggtcaagttcctgctcggcacgccgctgctgaatgacgtgttccacgccaaccgctgggactatgtgttctcgttccgccgcggcaataccccggtggtgcagcagcgccgcttcacggtgtttttcgaaggcgaccggctggtcaagttcagtggcgatgaactgccgtccgagtatgagctgattgccgagatcgacggcatgaaaaaggcgctgaaggaccagacgccgggcaagatctccaccggcgcgacagccgccgcggccgccccggccgaagcgcagaccacggtggagaactttgtgccgcggcaggcgcagcagccggaggcggcacccgcccctgcggcatcgccggccgctcccaccgaggcagcggcgccggcccaggcccccaaaccggccgccaactgatcggccgcacggcgcgccggcagcggcgcgccaccagttttccgggccggtcaggcatggccggctcgatcactttccgcgcattgcgcatattccgctgagccagacaccatgaacatcgccattgcaggcgcatcgggccgcatgggccgcatgctgatcgaacaagtgctgaacaccgagggcgtgagcctcgcgggcgcgctcgacgtgccgggctcgccggcgctgggccaggatgcgggcctgctgctgggccggcagaccggtgtggcgatcagttccgatgtggaagcggtgctggccggcgcggactgcctgatcgatttcacccgtcccgaaggcacgctggcccacgtggccgcggcgaagaagctgggcgtgaagatggtgatcggcaccactggcttcgacgaggccggcaaggccgcgttggccgaggccgccaggtcgatcgggatcgtcttcgccgccaacttcagcgtcggtgtcaacgccaccttcaagctgctggaagtggccgccaggctgctgtcgactggctatgatatcgaagtgatcgaggcgcatcaccgctttaaggtcgatgccccgtcgggcaccgcgctgaagatgggtgaagtgattgccgatgcgcttggccgcgacctcaagacctgtgccgtctatgcccgcgaaggccacaccggcgagcgcaatcccaactcgatcggttttgccaccgtgcgcggcggcgatatcgtcggcgaccacaccgtgatgttcgccggcatcggcgagcgcatcgagatcagccacaagtcttccagccgccagtcgtatgccgacggtgccgtgcgcgccgcccgtttcctcgccgacaagcccaacggcctgttcgacatgcaggacgtgctgggcctgaagtaaggcgccgcggggcgcgcagggccgaaactggcctgccgccacggttataatcgtcttctttcgcattgcacgcccggcgggcgccgcgcaagcggcgcgcccgctgctctcattccaacgattcccccggatgccggcaggccagttgccgcgcaaacgttgtcctgactgctgtcccgaccatgcaagacaaataccttccttccgccgttgaacaagccgcccagcagcactggcaagccatcgacgcctatcgcgtgtcggagcatgcggccggggccgacggcaaggaaaagcccaagttctacgcctgctcgatgctgccgtatccgtcgggcaagctgcacatgggccacgtgcggaactacaccatcaacgacgtgatggcgcgctacctgcgcatgaacggcaacaacgtgctgatgccgatgggctgggacgccttcggcatgccggccgagaacgccgcgctgaacaacggcgtggcgccggcggcctggacctacgacaacatcgcttacatgaagaagcagatgcagtcgatgggcctggcgatcgactggtcgcgcgaggtcgccacctgcagcccggactactaccgctggaaccagtggctgttcctgaagatgctggaaaagggcatcgcctaccgcaagaccggcactgtcaactgggatccggtcgaccagaccgtgctggccaacgagcaggtcatcgacggccgcggctggcgctccggcgcggtggtggaaaagcgcgagatcccgatgtactacctgcgcatcaccgagtatgcggaggaactgctgggcgacctggaccagctgggctggcccgagcgcgtcaaggtgatgcagcagaactggatcggcaagagcgtgggcgtgcgctttgcgttcccgcacgacatccccggcgaggacggcaagccgatcaatgacggcaagctgtacgtgttcaccacgcgcgccgacaccatcatgggcgtgaccttctgcgcggtcgccgccgagcacccgctggccacccatgccgcgctgaacaaccccgaactggctgcctttatcgacgaatgcaagcacggctcggtcatggaagccgacatggcgaccatggagaagaagggcatgccgaccggcctgcaagtggtgcacccgctgaccggcgagaaggtcgacgtgtgggtcggcaactacgtgctgatgagctacggcgacggcgccgtgatgggcgtgcccgcgcacgacgagcgcgacttcgccttcgcgctcaagtacaagctgccgatcaggcaagtcattgacgtgaagggccagccgtactcgaccgaagcctggcaggaatggtacggcgacaaggagcagggcacctgcatccacagcggcaagtacgatggcctcggctaccaggccgcggtcgaagccattgccgccgacctgggcgccaagggcctgggtgagaagaaggtgacctggcgcctgcgcgactggggcatctcgcgccagcgctactggggcacgccgatcccgctgatccactgcgacagctgcggcgtggtgccggtccctgagaaagacctgccggtggtgctgcccgaagacctggtgccggacggcaccggcaacccgctggccaaggatgcgcgcttcctgcagtgcacctgcccgtcgtgcggcaagccggcgcgccgcgagaccgacacgatggataccttcatcgactcgtgctggtactacatgcgctatacctgcccggatgcggccaccatggtcgatgcgcgcaacgattactggatgccgatggaccagtacatcggcggcatcgagcacgcgatcctgcacctgctgtacgcacgcttctggaccaaggtcatgcgcgacctgggcctggtcaagttcgacgagcccttcaccaacctgctgacgcagggcatggtgctcaacgagacctactaccgtgaagacgcgtcgggcaagaagcactggtacaacccggccgaggtcgacctgcgcaccgacgagcgcggccgcccggtaggcgccacgctgatcgccgacggccagccggtggtgatcggcggcgtcgagaagatgtcgaagtccaagaacaacggcatcgatccgcaggcgctgatcgaccagtacggcgccgacaccgcgcgcctgttcgtgatgttcgccgcgccgccggagcagcagcttgagtggagcggctcgggcgtcgagggcgcctcgcgcttcctgcgccgcgtgtggaactacggctatgccaatgccgcggccatccgcgacggcgccggcggcaagccgactgccgatgacgccgacctgcgccgcgagatccacggcgtgctcaagcaggccaactacgactaccagcgcatccagtacaacaccgtggtgtccgccacgatgaagatgctgaacgcgctggacgacgccaagacggcttcgccggccgcgcgccgcgagtgcttcggcatcctgctgcgcgtgctgtacccggtggtgccgcacgtcacccacggcctgtgggaccagctgggctacgccgccgaagccggcgacctgctcgacgcgccgtggccgcaggtcgatgaagccgcgctggtgcgcagcgagatcgaactggtgctgcagatcaacggcaaggtgcgcggcagcatcaccgtgcccgccgaagccgaccgcgccgcgatcgaggcaaccgccgccgccagcgagaccgtggccaagtttgccgagggcaaggcgccgaagaagatcgtggtggtacccggccgcctggtcaacgtggtgttgtaagctggccccggaacctgacaaggaatcgccaagaatgaagcgactgaacatggggcgccgcaaggtgctcgcggcaatgctggcagtgccggcaacgggcctgctggccggttgcggcttccacatgcgcggcaacgcggatttcgccttcaagcggctctatatcgggattccggccaattcgctgatgggcgcggacctgcgccgcgccatccgcggcggttccgacacccaggtggtagccgaccagaaagaggccgacgccctgctggacgtgctgcaggacacccgcaccaagtcgatcctgtcgatcacgaccgagggcgtggtgcgtgaataccgcctgacgcagcgtttcaccttccgcctgcgcgaccccgccggcaatgaactgatcgcgccgtcgcagctggtgctgacccgcgacctgacctacaacgaagccaacacgctggccaaggactacgaagagcagcagctgtaccgcgacatgcagcgcgatatcgtgcagcagctgatgcgccggctggccgccgtcaaggccatctgatcacggcatgcagctcaagctcgacgggctcgacgcgcacctgaggcaggccaaggccaagggcctggcaccgctgtacgtggtacatggcgacgaacacctgctggtgctggaagccgtcgaccgcctgcgcgccgcggcgcgcgaagccggcttctccgagcgcgacgtgctggtggccgagcgcggcttccactggggccagctagtcgaggcgcagcagtcgatgtcgctctttggcgaccgcaagatcgttgaactccgcatcccgtcgggcaagcccggcaaggacggcggcgaggcgctgcgcgccgtggccgcccagccgtcgcccgacgtggtgctgctggtgacgctgccgcggctggattttgccgcgtccaagtcggcctggttccaggcgctggaaggcgccggcgtgtcgatcaaggtcgactccgtggaccgcacccggctgccggcctgggtcggcgagcggctgtcgctgcagcagcaacgcgtcgaaggcggcgagccgggccgacgtgcgctgcagttcatcgccgacaaggtcgagggcaacctgctggcggcgcaccaggaaatccagaagctggggctgctgtacccgcccggcgagctcaccttcgaccaggtgcacgatgcggtgctgaatgtggcccgctatgacgtgttcaagctgtctgaatcgatgctctctggcgacgtgccgcggctggtgcgcatgctcgaagggctgcgcggcgagggcgaggccacggtgctggtgctgtgggcgctgaccgaggaaattcgcgtattatccaaggtccggcaagggctggcggctggcaagccggcgggtgtgctgatgcgcgaactgcgcgtctggggcccgcgcgagcggctggtgccgcaggccgcgcagcgcctggcgcagccaaggctggaagcggcgctggcactggcggcgcggctggaccgccaggtcaagggcctgtcggacctgccgccaccgggcggcagcccgctgccggcggaaccatgggacgggctgcagcagcttgccctgatgatcgcgcgctgaacgcgcaactccacaggtttgcttcccccgccgcgtgcggcggggggacggaaaacacactgacggccaccaccccagggccactgacatgaacgagctcgacctcaatcaatacatggaccgcgtcggccgccaggcccgcgccgcgtcgcgcgccatggcgcgtgcctccacggccgacaagaaccgcgcgctgctgaccatcgccgcggccatccgccgcgatgccgacaagctcaaggcggtcaacgcgcgtgacgttgaacgcgcccgcgccaacggccaggacgccgccttcatcgaccgcctgacgctgtcggacaaggccatcgccaccatggccgcgggcctggggcagatcgccgcgctggccgacccgatcggcgagatctcgaacatgaagttccgcccgaccggcatccaggtcggccagatgcgcgtgccgctgggcgtgatcggcatcatctacgagtcgcgcccgaacgtgaccatcgacgccgcggcgctgtgcctgaagtcgggcaacgccaccatcctgcgcggcggctccgaagcaatcgaatccaacaccgcgctggcggcgctggtggccgagggcctgtccgcggccggcctgccgtccgaggcggtgcaggtgatcgagaccactgaccgcgctgccgtgggccggctgatcaccatgaccgaatacgtcgacgtgatcgtgccgcgcggcggcaagagcctgatcgcgcggctgatggaagaagcgcgcgtgccgatgatcaagcacctggacggcatctgccacgtctatatcgacgccgatgccgacctggacaaggccgtgcgcgtctgcgacaacgccaagacgcagcgctatgcgccgtgcaacaccatggagacgctgctggtgtcgcaggacatcgccgccgccgcgctgccgccgctgtgccgcatctaccaggagaagggcgtcgagctgcgcgtgtgtccggccacccgcgccacgctggaagccgccggctttaccggcctggtcgatgccgccgaggaagactggcgcctggaatacctggcgccgatcctcgccatcaagaccgtggccggactcgacgacgccatcgcccatatcaacgaatacggttcgcaccataccgattcgatcatcaccgagaactactcggcgggcatgcgctttatccgcgaggtcgattcggccagcgtgatgatcaatgcctcgacccgctttgccgatggcttcgagtatggcctgggcgcggagatcggcatctccaacgacaagctgcatgcacgcggcccggtcgggctggaagggctgacctcgctgaagtacgtggtattcgggcacggcgagatccgcacctgacgctcgcgcgccaacaacaataacaatcgttctcgaacgtctctctgccgatgctctgggtcaaagcgctgcatatcgtcttcgtggtctcgtggttcgccggcctgttctacctgccgcgcatcttcgtcaacctggcgctggaaaccgacgccgccagcgcgcagcgcctgttgctgatggcgcgcaagctgttccgcttcatgaccatgctggcggtgccggcggtggtgttcggtctgtggctgtacctgggctacggcatcggccgcggcgcggggcagggctggatgcacgccaagctggcgctggtgctggtgctgatcggctaccaccatggctgcggcgtgttgctgcgcaagttcgaggcggggcgcaatacgcgctcgcacaagttttatcgctggttcaatgagctgccggtgctggtgctgctggcggtggtgatcctggtggtcgtcaagccgttctgagcctggcgcccggtctgttgttgccaatcctgtagcggaaccgaaatgagcaagctggttgactattacctgacgccgcagtcgccgtacgtctacctgggccatgcgcgctttgccgccatcgccgagcgccatggcgcgcaggtgaacctgaagccgtgcgacctgggcaaggtgttttccgtctccggcgggctgccgctgtcgcagcgcccgccccagcgccaggcctaccgcctggtggagctggcgcgctggagcgacttcctgggcctgccgctgcatctgcagccgacgttcttcccggtatcgggcgacgcggccagcaagctgatcatcgcggcgcagctggcgcacggcaccgcccgcgcgatgcagctgaccggcgccatcggcgcggcagtgtgggcgcagcagcgcaatatcgccgatgccgccacgctggcgcagattgccgacgaggccggcctggacggcgccagcctgctcagggccagcgaggcgcagtcggtgcaggcggcctatgcgcagaacacccaggacgcgatttcggccggcgtgttcggcgcgccgtggtacgtccatgacggccagcccttctggggccaggaccggctggatttcctcgagcgcgccctggcggcggcttgagctaagcttcggatagatccccgtccgctacggcggacgtttttgtttgcaggaaacccaacacatgacccaagccttctttgccccttgcccgcgcggcctggagagcgcgctcgccgaagaactgcgcgagatcgccgcgatgccgggcatggccgcgctggcgccgttcacggtgcaccaggaggtgccgggcggcgtcaatttctcgggcgagatggccgccgcctatgcggtcaacctgcattcgcgcattgccagccgggtgctgatgcgcgtggccgcgcgcggctaccggcatgaagacgacatctatacgctggcacgcggcgtgcgctgggagcagtggttttcgcccgatgaatcgctgcgcgtggacatcacctcgcacaagtcgccgctgcgcagcctgaatttcaccgcgctgcgggtcaaggacggggtctgcgatgccctgcgcgagcgtgtgggcgtgcgcccgagcgtcgataccgccagcccggatgtgcgcatctatgcccacctgaccgagcgtgactgcacgctgtacctcgacaccaccggcgagcccctgttcaagcgcggctggcgcaccgagaagggcgaggcgccgctgaaggaaaacctggccgccggcatcctgcgcctggcgggctgggtgccgggccagaccttccggcccttctacgacccgatgtgcggcagcggcaccttcctgatcgaggccgcgcaggtggcgctgggtatcgcgccgggcggcagccgcagctttgccttcgaatggctcaagggcatggacaccaaggcctggcagaagctgaagtcggacgcgcagcgcgcccgcatgctggcctcggccgatgagctgcaggtggtgggttcggacatctccaccgacatgctggcgatcacgcgcgccaactgggagcgtgccggcctgccgggcgaggcgcgcaccaagcaggtggatgcgcgcttcgtgcagccgccttttgatgagccgggtttgctgttgatgaatcccccgtacggcgagcgcatcgcggtgcgcggccagcgccgcctgccagaggaagcgatgccgcgcgacgaggtggaggaggccgccgccaaccagttcgccagtgccttcgccaccacgctcaagcagcatttcgcgggctggcaggcgtgggtgtttaccggcgacatgggcttcccgcgccggctgcggctcaaggagtcgcgccgcacgccgctctacaacggcaatatcgaatgccggctgttccgcttcgacatggtgcgcggcgccaaccgggcgccgcaggctgactgacggcgccgggccgccgggtcaggggcgcttgcgccccgtcagtgcgtcgggattgcggctgaagtccgccaggaagccctgcaggctgaccaccggctcctgcagcaggtggcgcggcaggtcgaacagcgcgtaaatgaattcttcattgccttcgcagcgctcggccggcaggcagtattgttcccagtccacgcacgccggcgtgtacatgccgttgccgggccagaagaacggcaccagccggccttcgcgcaggccttcgatcagtgccgccggggcatcgtaggcctcggccgattccacctggctcatcagcccggcgcgggtctcgatcaccatcagcgtggcgtggccctgcgcggtcagcagcaggatgccggccgggttggggtacaggtagtactcgacaaagccatagcgcgcgatcagctggcgcacgcgctcggtgatggccggatcggacaggaacgaaaaggaatgccgcgtcagcagctcgcgcagcgtgcgcgacagcgtggcaaagtacgcctgctgcatggcctcgatttcctggtccagccgctcgaccatattgctttcatgcttcttcacgtagcggtcgatcagcccgtggttgaagccctgcacggcgatgctctcgtcggcggtgccggtcagcaggatggtcttgcagggcaggtcctgcagcgcctggcagaattccagcccgtccatctgcggcatcgaatagtcgaccaccaccacgcccggctgcaggaagcgcttgaaatcgtggatctggcggtagatgcggtcgatgtcgagctgcacggtgcgccgctcggtcaggaaggtgaggtcgtcgtgcgtcacgcgcaccggcaggaagcccgggaagcgggtggcataggcctcgcggatccattgcagcgcttcacgcgggtcggtgaaggtgatcaccgcgcgcgaggcatccatctggaacgccaggctgtcgatgaacgacttgctgtcatcgaccaggacggtcaggaccgggtgatggaagaccgacaggttcctgtcgtgcgggttgaaggtcatggagcggcgggcaggggttcggcgcagtggttcggcacgggcgtggcgcaagcggcaagccagtgtgcgcattcgcaggccagtatagcgcgccacggctgccttgcaaggcacgccttgcagccagggccggcggcgggaggcgcccgcggcagggccgggatggcccgggcctgcgcgcggcgcgcggacggccttagtcgaccgccttgaacatatcctcgaccaccttcttggcgtcgccgaacaccatcatggtcttgtccatgtagaacagctcgttgtccagcccggcgtagccggcggccatggagcgcttgttgacgatgatggtcttggccttgtaggcctccaggatcggcatgccggcaatcggcgactgggggtcgttcttggccgccgggttgaccacgtcgttggcgcccagcaccagcaccacgtcggcctggccgaactcgctgttgatgtcttccatctcgaagacctggtcgtacggcacctcggcctcggccagcagcacgttcatatggcccggcatgcggcctgccaccgggtggatcgcgtacttcacggtcacgcccttttcggccagcttctcggtcagttccttgagcgcgtgttgggcgcgcgccacggccaggccatagcccggcacgatgatcacggtctcggcgttgcccatcaggaacgcggcatcgtcggcggaacccgacttgaccgggcgctgctgctggtcgccggttgccgccgccgcggtcgcgccgccgaaaccgcccagcagcacgttgaagaacgaccggttcatcgccttgcacatgatgtacgacaggatcgcaccggaggagcccaccagcgagcccgcgatgatcagcatcgggttgttcagcgagaagccgatgcccgccgctgcccagcccgagtacgagttcagcatcgacaccaccaccggcatgtcggcgccgccgatcgggatgatgatcagcacgcccagcacgaaggcgatcgccagcatgatcaggaacggcagccagtcctgcgacaggaagaagatgacgccgaagcccaccattgccaccgccagcagcaggttcagccagtgctggccggcaaacaccaccggcgcgccctggaacaggcggaacttgtagcgcccggccagcttgccgaaggcgatcaccgagccggagaacgtaatcgcgccgacgaagcagccgatgaagagctcgatgcggttgcccagcgggatcaggtgcgagcctgccgggctgatgccgaacgccgccggctcggccaccgccgccacggcgatgaagaccgcggccaggccgatcagcgagtgcatcgccgcgaccagctcgggcatcttggtcatctgcaccttcttcgccacgtaggcgccgatgccgccgccgaccacgagcgcggcgaagatcagcgccaggcccgtgcccaccgacgactgggccgtgcccgccgcgaggaattcattcttcagcttgatgatcaggaccagcgtggtcaccacggcaatggccatgccgatcatgccgaaggcattgcccttgcgcgccgaggccgggtgcgacaggcccttgagcgcctggataaagcagaccgaggccaccaggtagagcagggtgacaaggttcatgctgacaagaccggtcatcacgcaccctccctggccagcgccggcttggactcaggcgccttggccttcggttccttcttcttgaacatctccagcatgcgctgggtgaccaggaagccgccgaacacattgaccgcggccaacgccaccgccagcgtgcccatcacgcgcccgaccccgccttcggtcaggcccgcggcgagcatggcgccgacgatgatgatcgccgagatcgcattggtcaccgccatcaggggcgtatgcagggctggcgttaccgtccagaccacgtggtaacccacgtagatcgccagcacgaagatgatcaggttgatcaccgtgtggttcaccatctccatcgacttttcctccgttgctttgaatccgggatgcggcgttttactgaattcttattgctgcattgcggtcagggcacgtcaaggtccagtggctcagatcgacccattgcgtgccccctctcccgcttgcgggagacggttggggagagggcaggcttgcccacgaagtcaggccggcggtatgccagcgcctgccctctccccctgcccctctcccgcaggcgggagaggggagcaaaccctcagaacttcttgatttccttgatgccgttcttctcgttcaccaggatgaccttgggcttgtaggcggcgatttcctcgtcgctcatcggcgcgtaggtgcagatgatcagctggtcgcccaggtgcgcgcggcgggccgcggcgccgttcagcgagatctcgccgctgccgcgctcgcccttgatgatgtaggtggagaagcgctcgccgttgttcacgttgtacagctcgatcttctcgaactccttcatgtcggcagcgtccagcaggtcctggtcgatgccgcacgaaccctcgtagttgaggtccgcctgcgtcacggtgacgcggtggagcttggcgcggagcatgatgcgttgcatgggtgatacgtccttatatttgatgcaaaagcagtgggcgcatggcgcccgtggaaattacgccgcctctcgcacgaccttgccgtccctgcacatcaggcaggccgagacgatgtcgtcttcaaggttcagcgtgaattggccgtccttgtcgacgaccagcttgaggaagtccagcacgttgcgggcatagagcgccgaggcgtcggccgcgaccatgctggccaggttggtgtggccgatgatgatgacgccgttgtggttgaccacttcgtcggccaccgtcagcgggcagttgccgccctgtgccgcggccaggtccaccaccaccgagccgggtttcatctgcgccacggtggtttcctgcagcagcaccggtgccttgcggcccgggatcagtgcggtggtgatgacgatgtcggcctggaccgcgcgctggtgcaccagctcggcctggcgcttcatccagtccggcggcatcgggcgggcatagccgcccacgccctgggcgatctcgcgctcttcatcggtgaggaagggcacgtcgaggaacttggcgccgagcgattcgatctgctccttgaccgcggggcgcacatcggaggcctcgatcaccgcgcccagccgcttggccgtggcgatggcctgcaggccggcgacgcccgcgcccaggatcagcacgcgcgcggccttgacggtgccggcggcggtcatcagcatcggcatgaagcgctggtagtggtgcgcggccaccagcacggccttgtagccggcgatgttggcctgcgacgacagcacgtccatgctctgcgcgcgcgtggtgcgcggcgcggcttccagggcaaaggcggtgatgttcgcggcggacatgcgcgcgttgttgtcggcgtcgaagggattgagcatgccgatcagcacggcgcccggcttcatctgcgccagttcggcggcgtccggtgcgcgcaccttgagcaccagctgggcgcccagagcttcggcggcggtgccgatggtggcgccgaccgcctcatacgcgccgtcgggctggctggcgcttacgccggcgccggcctgcacgaccaccttgtggccctgggcgacgtacttcttgactgtctccggggtggcggcgacgcgagtctcgccggcccgcgtctcctgcgggatgccgatgtacatcgtcaatttctcctttagctggcgtcttgtgtggttgggcggaccgacgtctggcccgtgcgcgccgcaagcttaagccgcagcgcaacaattttttcgcagcttacaggaatctgacgttcaatggtgaccggccggtcggcttttgcggcgatcgccaaagagggagttgcagccgccattccagcaccagcctggcttaccggccgggggccatggcgggccggcggcgctgcacgatgggcccgcaaccggtagaatgcgggattgcctaaaaattgagcatcatgtcaagtgactggaatgccagcgtgaccgttgccgccgtgatcgagcgcggcggacgcttcctgctggtcgaagaggaaaccgccgacgggctgcgcctgaaccagcccgccgggcatctggacccgggcgagagcctgatccgcgcagtgatccgcgaaaccctggaagagaccgcacacacctttgagccgcgcgcgctgctgggctgctacatgggccgttcgctgtcgtcgcgcaccggcaccgatgtgacctatgtgcgctttgcctttaccggcgacctgggctcgctcgatgcgggccgccagctcgacaccggcatcgtgcgcacggtctggatgagcgcggaagaactgcgcgcctgcacggagcgtcaccgtacgccgctggtgatggcctgtgtcaacgactacctggccggcaagcgctttgcgctggacgccttgtacacgcacccgtcggcgctggccgcggccgtcccgcttggagcgcagccgtgagtggtgccggaaaacgtgtcgtggtgggcatgtcgggcggggtcgattcgtcggtcaccgcgtggctgctcaagcagcagggctacgaggtcatcggcctgttcatgaagaactgggaggacgatgacgacagcgagtactgttcaacgcgccaggactggctggacgtggtctcggtggccgacctgatcggcgtcgacgtggaggcggtcaactttgccgccgagtacaaggaccgggtctttgccgacttcctgcgcgaatactccgccgggcgcacgcccaaccccgacgtgctgtgcaatgccgagatcaagttcaaggccttcctcgaccatgccatgtcgctgggcgcggaaaccatcgccaccggccactatgcgcgtgtgcggcagaacgcggccggccggttcgagctgctcaaggcgctcgaccataccaaggaccagagctacttcctgcaccggctgaaccaggcgcagctgtcgcgcacgctgttcccgctgggcgagatccccaagacgcgcgtgcgcgagatcgccgccgagatcggcctgccgaacgcgaagaagaaggactccaccggcatctgctttatcggcgagcgtccgttccgcgatttcctgaaccgctacctgccgaccaagccgggcccgatgaagacgcccgagggcaaggtcgtgggcgagcatatcggcctcgccttctacacgctgggccagcgcaagggcatcggcctgggcggcagccgcgagggcaacggcgacgcctggtatgtggcgcgcaaggatatggcgaacaatacgctttacgtggtgcagggccacgaccacccgtggctgctgacgccggtgctgaccgcgtcggacctgtcctgggtggccggcgagccgcccgccgcgggcgcggcgatggcggccaagacgcgctaccgccagagcgatgcggcctgcacggtgcaggcggtggacggcgacgcgctgacgctccggtttgccgaggcgcaatgggcggtcacgcccgggcagtcggcggtgctgtatgacggtgacatctgcctaggcggcggcatcatccagtaagcgctgccgctgcacgaaaaaacacccgctcgaggcgggtgttttcttgtcggccgctgtggatcagccgcgcggcggttccgtatcgataaacgactggcgcttggacagcttttcctccagcgccgccaggttgggatggcgctcgcgccaggcgatctcggggaagcggaaatccaggtaggacagcgcgcagcccaccgccacgtcggccagcgaatagtgcgtgccggtgcagaaggggcggtcggccaggccgtgcgccatggccaccagcgccgcatcgatcttgccgcgctggcgctgcacccagcgttcgctgcgctcatgcggctcgcgctgggtggcctccaggcgcaccagcagcgctgcgtcgagcaggccgtcggccagcgcctcccagcagcggacttccaggcgctcgcgcccgccctgcgggatcaaccggctgaccggcgtcaaggtgtcgacatattcgacgatcacgcgcgaatcgaagattgcgccgccgtcttccatgaccaggcaaggcactttgccgagcgggttgaactggccgatcctggtctcgggcgaccagacatcctcttcgatgagctggcactcgatctttttctccgccatcaccacgcgcaccttgcgcgcgtagggactggtccgggatgcatacagcttcatattctccccttgagcttgttatgaagtgcatcgtcgctctgtggcagcggcggtggggcgcgcggcttgcccgatgcacttcataacaggctactggaacggcgtgcgcgagtatacccgtggtgcatggcgaatgcgggcttgcgcaccgatgccccgcggcggcgctttaccgctgcccggagccggggcaggggtggtaaaatcctgcgttgcgcagcgccggcgggcctgccggcgcggcgttttggacgcatccggccgcataaggtcgcttttccggtccctcccgccgccaacgctgacagcgccagcccccgcggcgcttcttgttcgtcgccttcttccattgcctcccttttcccggtttccagcatgacctcctcttcgctttcgccgctcaccgccctgtccccgatcgatggccgttacgccgccaaggccgatgcgctgcgcgaatggctgtccgaggccgcgttcatgcgcaaccgcgtcaaggtcgaggtgcactggctgatcgcgctggcgcaggccggcctgcccgacatgcccaagttctcggccgcctccgaggccgcgctgctggcgctggtggacaagttcagcgaggccgacgccgcccgcatcaaggaaatcgaagccgtcaccaaccatgacgtcaaggcggtcgagtactggctcaaggaacaggtcaagggcaacgccgagctggaagccgccagcgagttcatccacttcgcctgcacctcggaagacatcaacaacacctcgcacggcatgatgctcaagggcgcccgcgaaggcgtggtggtgccggcgctcaagcgcgtgcacgcccgcctggtcgagctggccaagctcaatgccgcgcagccgatgctgtcgcgcacccacggccagccggccagcccgaccacgctgggcaaggaaatggccaacgtggccgcgcgcctggcgcgcgcgatccagcgcatcgagcaggtcgagctgctgggcaagatgaacggcgcggtgggcaactacaacgcgcacctgtcggcctacccgagcttcgactgggaagccttctcgaagcaggtgatcgagacccgcctgggcctggtcttcaacccgtacaccatccagatcgagccgcacgactacatggccgagctgttcgacgcgatcgcccgcgccaacaccatcctgctcgacctgaaccgcgacgtctggggctatatctcgctgggttacttcaagcagaagaccaaggccggcgaaatcggctcgtcgaccatgccgcacaaggtcaacccgatcgacttcgagaactccgaaggcaacctgggcctggccaacgccgtgctgcgccacttgtccgagaagctgccgctgtcgcgctggcagcgcgacctgaccgattcgaccgtgctgcgcaatatcggcgtggccttcggctacagcctgctggcctatgaggcctgcctgcgtggcctgggcaagctggaaaccaaccccgagcgcctggacgaagacctggacaactgctgggaggtgctggccgagccggtgcagaccgtgatgcgccgcttcggcgtgcccaacccgtacgagcagctcaaggagctgacccgcggcaagggcatctcgcgcgaggcgctgcagaccttcatcaacggcctggcgatccccgacgacgccaagaagctgctgctgggcatgacgcccgccagctacatcggcaaggccgtggtgctggccgagcgcatctgacgccacatttcgcccctgaaccggggcgacgtgctgcaaaagccatccgcgaggatggctttttgcttttctggcgcagcgcggcgggcaggtcactgcggctttgtgccgcttgcgacagaatgtcacttcaaagcatttgaataacttaatgaaggactgtccttcatcggcgcacagcccgccgcaataatgcgagaatcgtaagcgcacgggcgggccagcccccgccggtgccttccccaaaattgtgaaacgctcctgcgcggggcgagaggagtccgatgcgttctaccgccaacgcccccaccggctacggtgccaccgcgatcgccttgcactgggtcattgcgctggcgatcttcgccgcgttcgggctcggcctgtacatgaccggcattccggggctgacgccgaccaagctcaagctctactcctggcacaagtggctgggcgtgacgatcttcgcggttgccgtgctgcgcgtgctgtggcgtgcaacccatgcggcaccgccggtggcgcccggcacgccggcctggcaggccaaagccgcggccggcgcccatcacctgctgtacctgctgatcgtgaccgttcctatcagcggctacctgtacagctcggccgcgggcgtgccggtggtctacctgggcctgtggaagatgccggcgctgctggagaagaacgacgaactgaaagaaatactcaagtttgtccatatctggctgaactacctgatggcggcggtggtcgttgtccatgcggcggcggcggtcaagcaccagttcgtcgaccgcgacggcacgctgggccggatgctgccgttcctgcgctgaggcgccgccccggccaactttttccgtaccgcggcgcgctgcgccgaccctgacaggagttttttgagatgaaacgcaattcccgccgcggctcgctcgtcatcgccgccgtcctggccgcctccggcatcgcagccaacctggcctgggcgcaggttgacgccgccaagagctcggtgaccgcggtcgcgcgccagatcggtgtgccgatggaaggcaagttcaggaagttcgatgccgcggtcagcttcgacccggccaagctggcgacctcgtcggccaaggtcgagatcgatgtgtccagcttcgagatcggcgacgccgagaccaccaaggaagtgaagggcaaggactggttcgacgccgccaagtaccccaaggccgtgttccagtccaccagcatcaagaacggcacgccgggcaagtacgacgtggccggcaagctgaccatcaagggcaagaccgttgacgtggtggtgcccgccacctaccgccaggaaggcgccgtgcaggtgttcgagggcgcgctgccgatcaagcgcacggtcttcaatatcggcgacggcgagtggaaggacacttccgtggtggccgacgacgtgcagatcaaattccgtatcgtgctggccaagaagtaacaagcaaggccggcattccgctgacgtacccaatcggcgttcgtgagaacgttccgccccaacctgatttgtcgggagattccatgaaactgcgttccctcgttgccgccgtcgcggccatttccgcaaccgccgccttcggcgtggcttcggccaataccgtgacctacaacctcgatccgacccacacctacccgagcttcgaggccgaccacctgggcggcctgtcgacctggcgcggcaagttcgacaagtccagcggcgtggtcacgctggaccgtgccgccaaggcgggctcggtcgaggtcaagatcgacccggcttcgatcgatttcggcaatgccaagctgaaccagcacgccaagggcccggacatgttcgacgtggaagccttccccgaggccgtctacaagggcaagttctccaagttcaagggtgacgtgccgaccgaggttgacggcatgctgacgctgcgcggcgtgtccaagccggtcaagctggaaatccgcgatttcaagtgcatccagcacccgatgctcaagcgcgaagcctgcggcgccgacgccgtgggccatttcaaccgtgccgacttcggcctggactacggcgtgaagatgggcttcaagcccgaggtcaagcttgccatccaggtggaaggcgtgcgcgcggactgagcgtgccagcccgctgcgccgggcttccaggcagtcaaggccggcaatgccggccttttttattggccggtatgattcaggcgcctgccagggcacttggttgtacgacccccgacgggcacagtacaatggcccgcggcaatccctccttgatcgtggcattgctactcctgccaaggcgggggcagccatgcccgcaaccggctaaagcgcatcactatgagcattcgctgcatgtcccgataccggtagccacccccgcgacctcctcgcccctcatgctgtacccggccgttctgccctggctgtatggcccgcagcgtttctcggttttccctggcgcaataccgtgtattccaaaacgcaaatcgatccggtagttagtttccgcaactcgcagggcgagcaggtgcggggcacgattgtcaatctccagagaaagtccctggtgatggagatctacaacccgtattcgatcgtgcaggtcagtgaggtgctgagcgaactcagcgtccgcatgggctcgaagaatgcctacctcggcaaggccgtggtcatgagcctggtgaacaccggcctgaccgcggtggtgtcgctgacgctgatcgacgagtggctggagctgagcaacctggacaacgagcccaagtcggtcgcgcgcgagtcgcagcggttcgtgcaggactggaatgagcgcttcaatatccggcccgactaccagatcgtggtcaatgaaatgcgcgcgttcctgtccgaggtgtcgcgctgggtggagcaggtcgacatgaccagcacgctgcccaaggaaggcgatacgctgcgcatggacgtgttcgaggagctggccaccccgatcgcactgaagatccgcgaatattccgcgcggctcgacggcgaagccgcgcacgtgccggaagaagacaccgtgatgcaccgcaccttcacgcaggcggcgctgcatcccttgctgctgcgctcaccgttcgtgttccggacctataccaagccgctcggctatgccggcgactacgaaatggtcaaccagatcctgtcggatccgcgccagggccccagcacctacttccagatcgtcaacgcaaccttcctgcagtcgtccgtggccgctgcccaccgcaaccgcatcaacctgctggtcgatttcctggtgcgcatggccgagcaggcccgggccgcgggcaagccgttccggctgctcaacgtgggctgtggcccggcggtcgagatcaaccgcttcattaccgaataccccgagccgcactggctgtcgttccagctgctcgacttcagccaggaaacgctggactacgcgcgcgggcgcatcgaagagagctgccgcaaggccaatgcgaaggtcgaggtggaatatgtccaccactcggtgcatgaactgctcaagcgccggatcgaccacgatccgtcgctgcgcgagttcgacggggtctactgcgccggcctgttcgactacctgtccgaccgcgtctgcgcgcgcctgctgagctatttctccacgcgcacccatcccgaggggcgcatcctggccaccaacgtccacgtcgacaacccggaacggtacagcatggaacatatgctggagtggtacctgatctaccgcgatgaggccggcatgcagtctttgctgccggccaatacgcgcgacggccgcacctacgtcgacccgaccggcgtcaacgtgtttgtggaagcgatcgtgactgatccggccaaggcctgaccaccatgctgaaacggactgcgagcaggtattccccgtacgaggctgacctgcgcgagtttcgcctggtctcgagccgggccggcgcgctgacggccatcgtgctggtgatggccggcgtcgggctcgactacgggatctatcccagccaccagctgcagttctttgtcgcccgcctggtggtctcggtcctgatcgggctgatcttcctgctgctggccaaccaggccggccggcgcttcgtgcagccgctcacgctggcctggctgctgctgctgccgcagatgatgatcacatggatgatcgccaccaccgacggcgcctcgtccatctactatgccgggctgaacctggtcatcttcgcggtcggcatcgccatgcccatgggcctgtggcagaccatcggctttggcgtggtcacttacctgctctacctcggcgcctgcctgatccaccccgatggcctggcgcagcgcgcgcacttcaccgtcaattcgctgttcatcatgttctcgatcgtggccagcgcggtctacacgttcatgaacgagcgcggccacttccacctgatacggctcaaggaagagctggcgcacaagaacgacgagcttgccgacatcaaccgccggctggccgacatcaagggccagatgctgcagcaggagaagatggccgccatcggtacgctggcggcggggctgctgcacgaggtgaacaacccggtcaacttctgcctgatggcgatcgaagtggcgatggaagagccacaggccaaggagaacccttcgctggaagagtgcctggtcgacgccaagcaggggatgcagcgcatccagcatatcgtctccgacctcaagacctttgcctaccgcaagccgggcgccgaggtggaaggcacgccgttcctgttcgagaaggcgctcgattcgtcgatccgcctgaccgcgcatgagctgcgcggggtcagcctcagccgcgaactgcctgccgacaccctggtgctgggcgacgaggcggccatcatcggcgtgctgatcaacctgttctcgaatgccgcgctggccatgcgcaaggcgggcacggccgcgcccgcgatccataccacggcccgctgggacaaccaccgcctgcacgtcatggtgcgcgacaacggccctggcatcccccaggaaaacctggcgcgcgtgttcgagccgttcttcaccacgcgcgaggtggggcaggggcttggcctgggcctgtcgatcagctacgcggtggtggaacgccacggcgggcagctgtatgccgagagcgaactgggccagtggaccgcgttcagcttcgacctgccgcgtgcggagtaaccagccatgagcgaagcgaagcaggcacggcttgccgtcctctatgtcgacgacgaggagatggcgcgcaagtatttcgcccgggccgccggcagcgactatgaggtgctggtggcagacagcgccgacgaggccctggcggtgctgcgcgcggaccccgcccgcgtggcggtgctggtgaccgacttccgcatgcccgggcgcgacggcggccagctgctgcgccaggtggcgcaggaatacccgcagatcgtgcgcatcctggtcaccgcctatgccgacaaggatgtgctgctggaaacggtcaacagcggcgaagtcttccgcatcctggaaaagccgctgagcgtggccgacctgcgcgaggtgctggcaggcgccgccgagcgccaccgcgagcgccaccgcgagcgcaccctgcgccagcaccggctgatggcgatcgacgagaccctggccttcctggcgcatgagctgaataccccgctggctgccatcgccaactttgcccacggcatccgcggacgtgtcgccggcgagtacagtgcgcagcgccaggccgagatcggccaggcggccagcgccatgtacgacaacgcccagtattgcctggcggtgctgtcgtcgttcctgcagtcggtgcgcaacagtgccggcagcacgccggcgcggcccgatgccggcgccgaggtcagcgccggctcgctggtcacttcgctgctggacagctacccgttcgcaggcgaccagcgcagctgggtgcaggtggagatgcacggcgatttcccggtgcagacgctgcccaactgcgtggcgctggtgctctcctcggtgatgagcaacgcgctgcgggcgctgggcagtgtcggcacgccggcgttgcgctttgtggtggtggcgcagccgcgcccggaaatccgcatctgcgacaacgggccggggattgcgccggaagtgatggagcggttgctggtcgaccctgtcaccacccacgccagtgccggcggcagcggcctgggcatgattttctgcaaccgcgtcatgcagtcgtttggcggcggcatccggatcgaatccgcatccggtgccggcacgacggtgacgctggactttccaagtttcaagagtcgaaagcataggagtgaccgatgaccgaaccgaatgccacgcaggcaccacccccggcgattctgttcgtcgatgacgaagcgactgcagtcaagtatttccagcgtgccatcggggcgctggcaccggtggccaccggcggctccgttgaagagggcaaggccttgctcgacgcccacgcagacagccttgcggtgctggtgtcggaccagcgcatgccgggcgagtatggcaacgaactgctgcgctacgcgcgcgagcgctacccgcatatcgtgcgcatcctgaccaccgcgtattcggagctcgaccagaccgtcgaggcggtcaaccaggggcagatccaccgctacatcaagaagccgtgggacatcaccgcgctgcgcatggagctgaagcaggcgctggaactggccggcctgcgcaaggaacgcgaccagctgctgcgcgagaagctgtccgtgctgcagacccagaccgtggcctcgcgcatcggcatggtgcatgcgctgtgcgccagcctgatcgggccgggccgtttccagccggtggagacctacctcgcggcggtcgacctggccggcgcgggcagcgtcgagccggactggcagcgcatggactacgccgacctggtgcgggccgaggccgagcgcagcggcagcttcggccatgccgtcggcacgcgcctggcgggcctgcgcagcgccaacgcgggcaagggggcggccgatgccgtcgcggtaatcgccgacgcgctgggcagcgaggtggtgcgccgcgatggcgataccgtggtctggaccgcgccggccacgttggccgagtacctggtgcagccggtgggcgcgccggtgtctgccgcgcatgcggcgtggctggccagcctgctgtggctggacgaggccggcggtgcgctgcagtttgcgcgcgatggcgacgccatcctgtgccgtgccggccagcgtaccgagttcttcgcggccgaccggctggcggcgtggatcgagcgctttgccgagcaacgttgacatggagccgggctgtagccggtgaggtgcaggctgacatggcaagcaagacgatcggtgcggccgctgccgtagccgccaggcgcagggggcggcccgcgcgctccgcgcagaacgtcgatacgcagcgcgcagcgattgtcgaggcggctcgaaccatcctggtttccgcgggactcgaggcagcgtccgccaggcggatcgcgttggcggccggcatcgccccggcgaccctctatctgtatttcgagaacatcgaagtcctttacgccgcggtgctgggcgagtccctgctccagttgcagcaatacgtgcgcgcggccaccggcgatgtcccgcccccggcaaagcccgccggcgacgcaacgccggcgcgggcccgcgccgcggcatcacgcgacattcgcccgaagggatctggttcaaggagtatgccgagcgctacggtcttgccgccgccgtggaatggcgcgattccggccgccccatccccgagcccgagccgggacaggaccgcgagccgctgatgccggccccgcccgcgggagcgcgctcacgctggtcaggccaggcataacaccggccggccgcggaaaaaaacaaaggcgcccggggcgcctttgttttcgtgggcggcaagccgtcaggcctgcgcgccgtagttggggtcgttgcggtcggtcgagtcggacttcttctcgcccttgaccagatcctcgcgcttgacgcccagccacatcgccagcgccgcggccacgaacaccgacgagtagatgccgaacaagatgccgaccgtcagtgccagggcaaagtagtgcagcgtggggccaccgaagaagaacatcgacagcaccatcatctgggtcgagccgtgggtgatgatggtgcgcgagatggtgctggtgatcgcgttgtcgatgatctcgtgggtgctcatcttgcggaacttgcggaagttctcgcggatccggtcgaagatcaccaccgattcgttgaccgaatagcccagcaccgccaggatcgccgccagcaccgacagcgagaattcccactggaagtaggcgaagaagcccaggatgatgaccacgtcgtgcaggttggcgatgatgcccgccaccgcgaacttccattcgaagcggaacgacaggtagatcacgatgccggccaccacgcacagcagcgcgagcaggccgtcggtggccagttccttgcccacctgcgggccgacgaactccacccgttgcagcttcacgtcaggcgaggccgcctgcagcgaggccatcacctgctcgctctgctgggccgaggtgacgggcttgccgtccgcgcccttctgcagcggcaggcggatcatcacgtcgcgcgaggtgccgaaattctgcacctgcacgtcggtatagcccagcttgcccacctggccgcggatcttttccaggtcggcggtctgctggtagctgacttccatcaccgtgccgccggtgaattcgatcgacaggtgcaggcccttgtgccagaggaagaacacggctgcggcaaacgtcaggaaggaaatcacgttgaagaccaacgcgtgcttcatgaacggaatgtcgcgccggatgcggaagaattccatgttgaatcctgttctgtactgctagttgttgctgctcgccttacttggcgaccggcgtgtcggtggtgttgcccggcttccagatctggccgatggccacgctctgcagcttcttcttgcggccgtaccagaggttgaccaggccgcggttgaagaacaccgccgagaacatcgaggtcaggatgcccaggcagtgcaccacggcaaagccgcgcaccgggcccgaaccaaaggccagcagtgccaggccggcgatcagcgtggtcacgttggagtccagaatggtggcccaggcgcggtcgaagccgaccgcgatcgccatctgcggcgacgcgcccgcgcgcagttcctcgcggatgcgctcgttgatcagcacgttggcgtcgatggccatgcccagcaccagcgcgatggcggcaatgcccggcagcgtcagcgtggcctgcagcatcgacagcaccgcgatcagcagcagcaggttcacgcccagcgccaccaccgagaacacgccgaacagcatgtagtacaggatcatgaacacgccgatggcggcaaagccgtaggcgaccgagtcaaaacccttccggatgttgtccgcgcccagcgacgggccgatggtgcgctcttcgatgatctccatcggcgcggccagcgagccggcgcgcagcagcagcgccaggtcgttggcggcttcggtggagtaggagccggtgatctggaagctggagcccagttcggactggatcgtcgccaccgtcagcacttcgcccttgcccttttcgaacagcacgatcgccatcggcttcttcaggttctcgcgcgagacgtcgcgcagcacgcgtccgccctgggcgtcgagcttgatgttgaccgaaggctgctggttctggtcgaagccggccgaggcgctttcaatgcggtcgccggtgaagatgacctgcttcttcagcaccaccggggcgccgttgccttgcgtgaagagctcgctgccgaacgggatcgggtcgcccgggcgcgggctgcgcggcgcgtcgttgtcgaccaggcgggcttcgagcgtggcggtgcggccgatgatgtccttggccttggcggtgtcctgcacgccgggcagctgcaccacgatgcggtcggcgccttgctgctggatcaccggctcggccacgccaagctcgttgacgcggttgtgcagcgtggtgatgttctgcttgaccgcggcatcctgcacggccttgcgggcggcttcggtgaaggtgccgacgatattgttgccgtccatggcgaaggcgacttcgcgcaggttgtcggccagcagcggacgcgcgcggttggcgtcgtcggcgttgttgaagcgcaccgtcaggcgctcgccatcgcggtcgatgccgccgtggcggatgctcttgtcgcgcagcagggtgcgcgcgtcgccgcccaggctgtcgagcttcttgtcgaccgcgcccttcatgtcgacctgcagcaggaagtgcacgccgccgcgcaagtccaggcccaggtacatcggcagcgcgtgcatggcggtcagccagcgcggcgagcccgacagcaggttcagcgcgaccacataggtggggtcggccgcgtcggggttgagcgtgcgcgacaggatgtccttggccttgagctgctcgtcggtggtgcggaagcgcgccttgaccgagccggactggccggaaatatcaaagaagacgccgtcaggctgcagctggttctgtgccaggatctcttcgacctgcttctgcatcgacaggtcgaccttgaccgtggccttgcccgaggacacctgcaccgcaggcgcctcgccgaagaaattcggcaaggtatagatgatgccgatggccagggccaccaggatcacgaggtatttccaaagcggataacgattcatctctggccagtcattcagcggttggcggggccggcgctggcgtggcgcaccacgtcggcggggccgaaccggtttggcaaacagccgcctggcaaccacggatcgaagccacgggggcttcgtcgggctggatcaggcggctgccggggcatgcgcgaacgggcatgccggaaaagacaaaggcgggagtcgcgcgcgcgatcggtggatcagagcgccttcagcgagcccttcggcagcaccgtcgtcacggcgttcttctgcacggtgatttccgtgccttcggcgatttccaggctgacgtactggtcggtgaccttggtcaccttgcccaggatgccgccggcggtcacgacttcgtcgttcttggccagcgcttcgagcattgccttggcttccttctgacgcttcatctgcgggcggatcatgatgaaccacagcacgccaaacatcaggatgatgggcaggaagctcatcaggccgccagccgcgccgccggtaccggtggtctgggcaaatgcgttagaaatcagcacgttgattctccgtcacaaaattagtcaaataatcgatcattctaccattcgcattccgcccacccttggcattctagggcggaatacgggtttgttcgggtgcgcccgggacaacttgcggcaggggcggcaaggccgggcgctccggatcgcggctcgcccccggatgacccggctattcgaccgccggcagcgcaaaagttcgcgccagcgggcattgtcactgcgtgccgcgggcgcggtcagcggcgaactggcgccggaagtcggcaaagcggtggtgctcgatggcttcgcgcatctcgcgcatcagttgcaggtagtagtgcaggttgtggatggtattgaggcgcgcgcccaggatctcgcctacgcggtgcaggtggtgcaggtaggcgcgcgagaagttgcggcaggtgtagcaggcgcagctttcatcgagcgggcgcggatcgttgcggtgcgccgcgttcttgatcttgacgtcgccgaagcgggtgaagagccagccgttgcgtgcgttgcgggtgggcatcacgcagtcgaacatgtccaccccggcggcgacgccggcgaccaggtcttcgggcgtgcccacgcccatcaggtagtgcggcttgtgggccgggaggcgcggcgcgacgtgctcgagcacgcgcatcatgtcttccttgggctcgcccaccgacagcccgccgatggcaaagccgtggaagtccagctcggacaggccggccagcgattcgtcgcgcaggtcttcgtacatgcctccctggacgatgccgaacagcgcgttggggttggccaggcgctcgaactcgtcgcgcgagcgcttggcccagcgcaggctcatgcgcatcgacttggccgcttcctcgtgcgtggcggcgcggccgtcgatctcgtacggcgtgcactcatcgaactgcatcacgatgtcggagttcagcgtgcgctggatctgcatcgagatctcgggcgacaggaaaagcttgtcgccattgaccggagatgcgaacgtgacgccatcttcagtgatcttgcgcagatcgccgagcgaaaacacctggaagccaccggaatcggtcaggatcggcttgtcccagccgataaacttgtgcaggccctcgtgggcgttgaccacgtccaacccggggcgcagccacaggtggaaggtattgcccaggatgatgtgcgcgccaatctcgttcagttccagcggcgacatcgccttgaccgagccgtaggtgccgaccggcatgaagatcggcgtctcgaccacgccgtggttcagcgtgacgcggccgcggcgggcgttgccgtcggtggtgatgagttcgaagttgagcatggcttgtgattctggattcaggcgccgggctggcgggtcagcagcatggcgtcgccgtagctgaagaaacggtagcgctgctcgaccgcatggcggtaggcggcgcggatggcttccacgccggccagtgccgacaccagcatcagcagcgtcgacttgggcaggtggaagttggtgatcagggcatcgaccaggcggaagcggtagccgggggtgatgaagatatcggtgtcgccgctgccggcggcgagcgtgccgtcggcctgcgcggccgattccagcgcgcgcagcgaggtggtgccgaccgcgatcacgcggccgccgcgtgcgcgggtgtcgcgcacggcctgggccaggtctgcggagacggcgtaccactccgagtgcatcttgtgctcggccaggttctcggtgcgcaccggctggaaggtgccggcgcccacgtgcagcgtcaggaaggcgcgccgcacgccggcggcattgagccgcgcgaacagcgcatcgtcgaaatgcaggcccgcagtgggtgcggccaccgcgcccgggctgcgcgcgtagacggtctggtagcgggtctcgtcgtaggcgtccgggtcgtgcctgatatatggcggcagcggcaggcggccgtagcgctcgatcaggtccagcgccggttcggggaagcgcagcgtgaagaactggtccacacgcgggcccacggtgacggcgaaggcgccgtcggccaggtgcagtatgctgccctcggtcggggtcttggaggcgcgcacctgggccagcacggtgtggctgtcgaccacgcgctcgaccagcacctcgatcttgccgccgctgggcttgtggccgaagaagcgcgccttgatcacgcgggtgtcgttgaagaccagcaagtcgtcgggacgcaggtagtcgacgatgtcgctgaaggcgcggtcgaccatgcgcaccgcgtcggcggtgtcggccggggccagccgttcgaccaccagcagccggctcgcgctgcggtcgggcagcgcgctctgggcaatcagttctggcggcagcgggaaatcgaaatcggaaagcgtcaacatcgtgggagcggcgggctgcgcgatcccatgcaggccggagcggggcacaaaacggcactccgctgcccgtggtggcagccggcatgggtacaatcggcgaatccgatattgtaaggccacgggcgcgcttgccgccgggccaggcttgatgccggctattcgccggcgccgcgccagccaaccccgcagcacgagagcgaccgctgccaactttttcgccgatgcccggaaccgccgctgaaccgatccacgaccccgccgacgccgccaaggaaacggcggcgcccgcgcgcggcaaggccggcgaagccaggggcaaggccgccgcctccggcacgtcttccgcggccgcgcgcctggccaagctcggcctgcgccgtcccgtcgacctggtgctgcacttgccgatgcgctatgaggacgagaccacgctggcgccgatcgccgaggcgatccaccgcgccgggctcgggctgccggcgcaggtggaaggcgaggtcatctccaacgaagtcacgttccggccgcgccgccagctggtggtcaagatcgccgacgacagcggcgagctgacgctgcgcttcctgaacttctacggcaaccagaccaagcagatggccgaaggcgtgcgcctgcgcgtgcgcggcgaggtgcgcggcggcttcttcggcgccgagatggtccacccgacggtgcgcccggtggtgcccggcgaagcgctgcccgaccgcctgacgccggtgtatccgtccaccgccggcatcccgcaggcctatctgcgcaaggccatcggcggcacgctgtcgcgcacgcccatgcccgagacgctgccgcgggcggtgttggacgggccgctggcacgcctgcacctgcgcccgctggccgactgcctgcggttgctgcacgcgccgtcgccgcaggagagcgaggccgcgctggccgaccgctcgcacccggcctggcagcgcatcaagttcgacgagctgctggcgcagcagatctcgctgcggcgcgcgcacgcggcgcggcgcgaaaagaccgcgccgaccatgccgcgccgcgagggcggcctgctgacgcgcttcctggctgcgttgccgttccggctgaccggggcgcagcagcgcgtggtggaagaaatcgctgccgacatgacgcgcccgcacccgatgcaccggctgctgcagggcgacgtgggcagcggcaagaccatcgtcgccgcgctggcggcctgccaggcgatcgatgccggctaccaggccgctttgatggcgcccaccgaaatcctggccgagcagcactaccgcaagctgtccgcatggctggagccgctgggcgtgccggtggcgtggctggccggcagccagaaggcacgcgacaagcgcgaggccgcggcgcgcgtggaatcgggccaggcgcagctggtgatcggcacccacgcgctgatccaggacaccgtgcgctttgccaaactggggctgtcggtggtcgacgagcagcaccgcttcggcgtggcgcagcggctggcgctgcgcggcaaggccggtgccgccgatacccccgattcagcggcaaccgcggccgagaccgtgccgcaccagttgatgatgtcggccacgccgatcccgcgcacgctcgccatgacttactacgccgacctcgatgtgtcggtgatcgatgaattgccgccgggccgcacccccatcgtcacgcgcctggtcaacgacgagcggcgcgacgaagtgatcggacgcatccatcacgccgccgccgaaggccgccaggtctactgggtgtgtccgctgatcgaggaaagcgaggcgctgcagctgcagaccgcggtggagacctatgaaacgctggtggccgcgctgcccgacctgcgcgtgggcctggtgcacgggcgcctgccgccggccgagaaggccgcggtgatggacgacttcagcgccaaccgcatgcaggtgctggtggccaccaccgtgatcgaagtgggcgtggacgtgcccaatgcctcgctgatggtgatcgagcacgccgagcgcttcggcctggcgcagctgcaccagctgcgcgggcgggtggggcggggcagcgccgaatcggtctgcctgctgatgtaccaggcgccgctgtcgccgaccgcgcgcgagcgcctggcgaccatgcgcgagaccaccgacggcttcgagatcgcccggcgcgacctggaaatccgcggcccgggcgagttcctgggtgcgcgccagtccggcgaagcgatgttgcgctttgccgacctgcagaccgacgcgtggctggtggaatacgcgcaggaggcggccgaactgatgctggcgcgctacccggaagcggtggaagcgcacctttcgcgctggctgggtgggcgcgagcactacctcaaggcttgatcgcgggctggtttttcgacgggatgtgcgccattcagcgcacccgccagtccgctgcgggctattcgggctggcgctctgacagaagcggcaatcgaaggtaaaatctatcgcctaccggaaactgataagtcatgacgctcaccgaactcaagtacatcgtcgccgtggcgcgcgagcgccatttcggccgggccgccgaagcctgctttgtgtcgcagccgacgctgtcggtcgcgatcaagaagctggaagacgaactcaacgtgcagattttcgagcgcggcacctccgaggtgtcggtgacgtcggtcggcgagcagatcgtggcgcaggcccagcgcgtgcttgaacagaccatggccattcgcgagatcgccaagcagggcaaggacccgcttgcgggtccgctgcgcgtgggcgtgatctacaccatcgggccgtacctgctgccgtcgctggtcaagcagatgatcgagaccgtgccgcagatgccgctgatgctgcaggagaactacacccacaagctgatcgagctgctcaagcagggtgagatcgactgcgcggtgatggccgagccgttcgcggattcgggcctgacggtgcgcccgctctacgacgaaccctttgtcgtcgccgtgccgcgcggccaccagctggcgcaggcgcgctccatcgaccccgatgaactgaagcagcaaaccatgctgctgctgggcagcggccactgcttccgcgaccatgtgctgggcgtgtgcccggaactgtcgcgcttctcgcaggcggccgacggcatccagaagaccttcgagggctcgtcgctggaaaccattcgccatatggtggccagcggggtcggcatcaccgtgctgccgcgcacctcggtgcccgacctgaaggccaagggcgacatgctgtcctatgtgccgtttgccgatccggtgcccgaccggcgcgtggtgctggcctggcgcaagagcttcacccggctgccggctatggaagcgctggccaacgccgtggccgcgtgcgagctcgccggcgtgcgcaagctggacgccaaggagctggccgaagcggcctgatcttcctgcccccacagtacaggcatttccctcggccgcaccggagattccgctgcggccgttgtcatttccggcccagcaacggggtatttcagggacctgtcttcgggcggtcaccttccgctgcgataagttgcagaaatcccagatagatttgacctaatacataggtataaataattgaattctcaattcgatagatcgttggtaggctgactcctgtcgatgcagatggcatcgacctgagacaggaaccaatgatgagcaccagcgcccagttctctccgacaacaatcaacgggcgcccgtttcccctccgcgtggggcgctgcctgctcgattgccttgcctgctatgccgccgcgctctgatgcggcgttccctttcagcctacccacaaagaggaaaagatgagcaagaaggacacccttaccactgccgccggcgcacccgtcgccgacaaccagaacgcgcagacggccggtccgcgcggcccgatgctgctgcaggatgtctggttcctcgaaaagctggcccacttcgaccgcgaggtcatccccgagcggcgcgtgcatgccaagggctcgggcgcttatggcacgctcaaggtcacccacgacatcaccaggtacaccaaggcttcggtctttgcccaggtcggcaaggagacgccgctgttcatccgcttctcgaccgtggccggcgagcgcggcgcggccgatgccgagcgcgacgtgcgcggcttctcgatcaagttctacaccgacgaaggcaactgggacgtggtcggcaacaataccccggtgttcttcgtgcgcgacccgctcaagttcccggactttatccacacgcagaagcgcaatccgcgcaccaacctgcgcgacccgatcgcggtgtgggacttctggtcgcgccatccggaatccctgcaccaggtcaccatcctgatgagcgaccgcggtctgccgcagaactaccgccagatccacggcttcggctcgcacacgtactcgttcatcaacgcgaacaacgagcgcttctgggtcaagttccacttcaagtcgcagcagggcatcgccaactggaccaatgaagaagcggccaaggtcgtggcaacggaccgcgaaagcgcgcagcgcgacctgttcgagaacatcgagacaggcaatttcccgcgctggaacctgcgcgtgcagatcatgccggaggcggatgcggccaagtaccacatcaatccgttcgacctgaccaaggtctggccgcacaaggactacccgctgatcgacgtgggcgtgctcgagctcaaccgcaacccggacaactactttgccgaggtcgagcaggtggcgatgaatccggccaatatcgtgccgggcatcggcttctcgcccgacaagatgctgcaggggcggctgttctcgtacggcgacacgcagcgctaccgcctggggatcaaccacaaccagatcccggtgaatgcgccgaaatgcccgttccacaacagcttccaccgtgacggcgcgatgcgcgtggacggcaaccagggaggcaagctcaactacgagcccaaccgcgaaggcgcctacgccgccagcgaacgcgcgatcgagccgccgctggcactggatggtgccgccgaccactgggaccaccgcgtcgacccggactactacagccagcccggcgcgctgttccgcctgttcgacgaaggccagcgccagcgcctgttcgccaatatcgcggcggcgatgcagggcgtgcctgaggcgatcgtgcgcgtgcagctggagcacttctccaaggccgacccggcctacggcgagggcgtgaagcgcgcgctcaacctgaagtaagcggcagcctggcgcggcgcccctggcgggatgccgcgccgcggagaacgatgatggcgatgatccggttgtttatccaagagtggcgacagctgtggcatgacgggcacgaccagcccgggcgcgccgatgccgcgcggctgcgccacaagctgtggcgcaaggaaatcggcgccgccgtgatcgtgctcggcgcgaccgtgatgttcagcgaggtggcccggggtttggccgggattgccggctagtgcaataatgcgggtactgcgccgcccggccccaaaacatggaaagcgccggcggcgcccctcgtggctttaccagaacggagcgtatttaccatggcaaagaagaatgagatgagcgtgaatatcggtatttccgacaaggaccgcaagaagatcgcggaaggcctgtccaagctgctggcggacacctacaccctctacctcaagacccataacttccactggaacgtgacgggtcccatgttcaatacgctgcatctgatgttcgagacccagtacaccgagctggcgctcgccgtggactcgatcgccgagcgtatccgcgcgctgggctacccggcaccgggcacctacaaggaatacgcccgcctgtcttcgatcgcggaggaagagggcgtgcccgaggccaccgaaatgatccgcaagctggtcgaaggccaggaagccgtggtgcgcaccgcgcgttcgctgttcccggtgatcgacgccgccggcgacgaaccgtcggccgacctgctgacccagcgcatgcagacgcacgaaaagaccgcgtggatgctgcgcgcgatgctggcctgaggccagcttgccacctccggctgcccttcagtagcggccggcactgcgcgtcgcaaccgtccgggctgcggcgcgttttcattgaatcctccttcccggatccgcgcagtgcagaccctctcgccgttgccccccacgcccatgcttgaacgcctttccctctacgcgcgcctggtgcgcatcgacaagccgatcggcacgctgctgctgctgtggccgacgctgtgggccatgtggatggccgcgggcgggccgccggcgtgggggctgttctggatcttcgtggcgggcacctttctgatgcgctcggctggctgcgccatcaacgactgggcggaccgcgacttcgacaagcacgtcaagcgcaccagggaacggccgctgaccgcgggcaagatcgcagcgtgggaagcgctggccgtcgccgccgtgctggcgctggtggcttttgcgctggtgttgccgctcaatgcgctgaccaaatggctggcggtggtggcggcggtggtggccggcacttacccgttcttcaagcgcttctttgcgattccgcaggcttatctcggcatcgcgtttggctttggtatcccgatggcgtttgccgcgatccaggaccaggtgccgccggtggcgtggctgatgctgctggccaatgtgttctgggcggtggcgtatgacacggcttatgcgatggtcgatcgtgacgacgacctcctgatcggcatgaagacttcggccattacctttggccgcttcgacgtggcggcgatcatgctctgctatgccgcgttcctggcgctgatggcgtgggcgggggtgctgctggggctggggtggccttactgggtggggctggcggcggctgcgggttgcgccgggtatcattacacgctgattcgtgaccgcgaccggatgcggtgtttcgcggcgttccggcataacaactggctgggggcctgtgtgtttgcggggacggcggtggcttatgcaattcgctgattagatcccgctggttttctcccctctcccgcttgcgggagaggggagcgttcacatggggcggcggccaggtcagagcgcccgcggtttggccgcgcctcaatccttcccgaactccgcccccatctccttgccccgcgccgcggcagcatgcatcgcgcgcacgaaggcatcaccaatgcccgaagcctccatcgccgtcagcgccgcatacgtcgtgccgcccttggacgtcacgcgctcacgcagcgtcgacaccggctcggaagactgcccggccagggtagcagcgccacggaaggtctctaccgccagttcgcggccttgctccgccgtcaggcccagctcggtggcggcgcgttccatcgcttcgataaagtagaagacataggccggcccactgccggaaatggcggtgaccgcatcgatctggtcatccccatccacccatacgcacttgccgacggcctcggccaccgcgctggcgatcgcgcggtcttcggccgacagcccggccggcgcggccagcccggtcatgcccatgccggccagcgccggcgtgttcggcatcgcccgcaccagccgggcgcgcccgtccagccagcgctccatgtcctgcagccggatgccggcggccacgctgatcaccaggttgcccttgccgctggccggcaggatcggcagcagctgcgccgcggcgtcgcggaactgctgcggcttgaccgccagcaccagcacgtcgcaggcgccgaaggcggcatccggcgcgccggcggcatgcacgccgaggtcgcgcgccaggcgttgctgggcctcggggaaggggtcgaccacgcggatcgagccggccggcacgccgcgggcgatcaggccgccgatcagtgcggtggccatgttgccgccgccgagaaagccaaaggtaagggtatcgagcatggagatccgttggggggcttgaagggaatggactgggcgcgccggactacgggtattggcgcgctccgaaaatggcggtgccgatccgcaccagcgtggcgccctcggcgatggcggcttccatgtcgcccgacatgcccatcgacagcgtgtcgaggtccaggccgtcggtgcgcagcgcctgcagcatggcgcgcatggccgcgaacgggcggcgctgcgcggcggggtcgtgctcgggctcggggatggccatcagcccgcgcaggcgcaggcctggcagcgcggcgacggcatgtgccaggccgggcacctctgccggggcgacgccgctcttgctggcttcgccgctgatattgacctggatgcagacctgcagcgcggccatgccggccgggcgctgggccgacagccgctcggcgatcctgagccggtcgacggcgtgcacccagtcgaaatgctccgccaccaggcgggtcttgttgctctgcagcgggccgatgaaatgccattgcaggcggtggcgcaggtcggccagcgcggcgatcttgtcgacgccttcctggacgtagttttcgccgaaagcgacctgtccggcggcgtatgcggcccttatgcggtcggggggaacggtcttggaaaccgccagcagggcgatgtccgcgggctgtctgccggcttgttgtgcggccgccgcgatgcgctggtgaacggcttgcaagttggcggcaattacagacataatccggcgaacatacaaaagaaagtacgcaaagtactgataactagggtggggtcattatagatggacatcgcgcagctattggctttcgctgtcaagaacaaggcgtctgatcttcatctctccgcggacatgccgccgatggtgcggatccacggcgacatgcgccggatcaacatcgcctcgatgacgcacaaggatgtccacgccatggtgtacgacatcatgagcgacacccagcgcaaggcctacgaagaacgcctcgaaatcgatttctcgttcgagatcgccggcctgtcccgcttccgggtcaatgcctataacacccagcgcggcgccgccgcggtgttccgtaccattccctccaaggtgctcacgctcgaagagctgcgcgcgcccgcggtgtttgccgacctgtgcatgaagccgcgcgggctggtgctggtgacgggcccgaccggctcgggcaagtccaccacgctggcggcgatggtcgaccatcgcaacgaaagcgacatgggccacatcctcacggtggaggacccgatcgaattcgtgcacagctccaagaagagcctgatcaaccagcgcgagctggggccgcacacgcattcgtttgccaacgcgttgcgctcggcactgcgtgaagacccggacgtgatcctggtgggtgagctgcgcgacctggaaaccatccgcctggcgctgaccgcggccgagaccggccacctggtcttcggcacgctgcacaccagctcagcggccaagaccatcgaccgcgtggtcgatgtgttcccgcccgaagagaaggacatggtgcgcaccatgctgtcggaatcgctggaggcggtgatctcgcagacgctgctgaagacgcgcgacggcaatggccgcaccgccgcgcacgagatcatgatcgccacgcccgcgatccgccacctgatccgcgagaacaagatcgcgcagatgtactcgatgatgcagaccagcagcgggctgggcatgcagacgctggaccagtgcctgtctgacctgatcaagcgcagcgtcatcagctacaacgacgcgcgcgccatcgccaagaaccccgacgcgttcatgggctgaggcccgctccccagcaggacaccgacatgctcgatcgcgaatccgccgccaagtacatcaacgacctgctggagctgatggtcagcaaccgcggctcggacctgttcattacctctgacttcccgccggcgatcaaggtcgacggcaagatcaagccggtgtcgcagcagccgctgaacccgacccaggcgctgggcctggtgcgctcggtgatgaacgagcgccaggtgcaggacttcgacaccagccgcgaatgcaatttcgcgatcaccgcgcccaaggccgggcgcttccgcgtgtcggcctttatccagcagggcaaggccggcatggtggtgcgcaccatcaatacgcgcattccctcggtggccgacctggacctgccggcgacgctgcatgaggtggtgatggccaagcgcgggctggtgatcgtgaccggcgccaccggctcgggcaagtcgaccacgctggcggcaatgctggatcaccgcaacgcgcattcgtacggccatatcatcaccatcgaggatccgatcgagtacgtgcatgcgcaccagaactgcatcgtcacgcagcgcgaggtcggcatcgataccgagtcctggcacgtggcgctgaagaacacgctgcgccaggcgcccgacgtgatcctgatcggcgaaatccgtgaccgcgagaccatggagtacgcgatgcagtacgccgagaccggccacctgtgcctggccacgctgcacgccaacaatgccaaccaggcgatcgaccgcgtggtcaacttcttccccgaggaaaagcgccagcagctgctgatcgacctgtcgctgaacctgaaggcgatgatctcgcagcgcctgctgccgcgcgccggcaaaaaggggcgcgtgccggcggtggagatcatgatcggcacgccgctggtggccgacctgatcttcaagggcgagatccacgagctcaaggaagtcatcaagaagtcgcgcgagcagggcatggtctcgttcgaccaggcgctgttcgacctgtacgaggaaggcaagatcacctacgaggacgcgctacgcaatgccgactcgctcaacgacctgcgcctgatgatcaagctgcacagcgcgagcgccaaggacaccgacctgggtgccggcaccgagcatctcaatgtcatctgattcgtgcacggtgatgcgcatggcgttatgcttgggccacgcaagggccagttccggccccaggagtctgccatgagcaatgtctaccagttcgaagccaactcgctggccggccagccggtaccgctgtcgcagttccagggcaaggtgatgctggtcgtcaacaccgccagcgaatgcgggttcacgccgcagtacgagggcctgcagaagctctacgacgaataccacgagcgcggcctggaggtgctgggcttcccgtgcaaccagttcggcaagcaggagccgggcgatgcgcagcagatcggccagttctgcgaaacgcgctttgcggtgcgcttcccgatgttcgccaagatcgacgtgaacggtgccgacgcccatccgctgtaccagtggctgaccacggaaaagcgtggcgtgctcggtacccagggcatcaaatggaacttcaccaagttcctgctgcgccgcgacggcacggtgttcaagcgctatgcgccgaccaccaagcccgacgagctgcgcgccgatatcgagatgctgctgtccgacccggctgcctgagcgggactaggtgccgctggcgcgcaccgcgcgcaggaaaccgttgagcgagcggtcgggcgtttcgtggaaatggtcgtccagcatgcggatggcgcggcagcggtccagccggaagctgcgatagtccgagcgcgtggtgcaccacgtcgccagcaaccaggcattgccccagaagaacaggcccagcggcatcaccacgcgttcggtgatgcgctgctgcacgtcgcaatagtcgagcagcagcaatttctgttcgcccagcgccccgtgtaccacgtcgaaggcctcgcgcacatgcgcctggttgacgtattccggcgcgaacacgcggctttgctgcgctgccagccggcgcggcggcggcagcgcggccatcagtttttccagcgcgggatcggccgcggcggccagcgcgccgccgccccaggctttcaggaggcgcaggccggcgaccagtgcttcgacttccatggcggtgaacatcagcggcgggacatcgaagtcggcgcgcagccggtagccgatgccggcctcgccctcgaccggcacgcctgacagcgacagcgcctggatatcacggtagacggtgcgttccgataccccgagccgctgcgccagcagcgccgccgtggtcaggcggcggccgcgcagcacctgcacgatctggaacaggcggtcggcgcggcggctcatcgggggcggcttgccatcggggtcaggcggccacgggctcgtgcagcccgatgcggttgccttcgctgtcggtgatatgggcgatgcggccgatctcgcccggcaggcgcagcggcccgaacaccgtcttgccgccggcgcgcgcggcgcgctccagcagcacatccagttccggcgcatgcaggtacggcaccgcgccgtagtagttgctgggacgatagccctcgccggcgaccagcgcgccgcccgggtcggggtgggggaacacggccatgtcgacctggctcatggtctcgcggcgcagctggatattgaacacctgctcgtagaagccgaccgcgcggctcatgtcgacgacggggatttccagccagttgatcagacggttgctcatgacagactccttggttccaggtgaaggggagtggggagctcgcatcatgcgcgggggctgctgacagcgtgctgtcaggagcgtgtcagtgtggcatccacgccgccatcaccggcaccatgatcgccgtcagcacgccgttcaggcccatgcccagcgcggcaaaggcgccggcttcctggttgacctggaaggcgcgagcggtgccgatgccgtgggctgccacgccggtggcgaaaccgcgcacgctgtagtcgcggatgcgcagcaggttcagcacgctggtggcgctgaccgcgccgatgatgccggtggccatcaccagcaccgcggtcagcgagggcagcccgccgatcttctcggccacgcccatggcgatcgggatcgtcaccgacttgggcgcgagcgagcgcacggtctcgggcgatgcgcccagcagccaggcaattcccaccgccgacaccaccgccaccaccgagcccgccaccagtcctgccagcagcgggaacacatgggtgcgcagcttgggcagctgcaggtacagcggcaccgccagtgccaccgtggccggccccagcaggaagtgcacgaactgcgcgccgtcgaagtaggtcttgtagggcgtgccggtgacggtcagcaccgtgaccagcagcgccaccgcgatcatcaccgggttggccagcggcgagaagcgcgaacgctcatagatgcggaaggcaaagacgtaggccagcagcgtggcggtcagcccgaccagcgggctcgcggccaggtagacccagatctcgttgaggcggggcgtcatcatgcctgctctcctttcgcatcggcgggcgggacatcggcgcgcttgcgcatcagcatgcgcgtgaccacggcggtggtggcgatggccagccaggtggacaccaccagcgccaccaggatcggcatccattcgccctcgatgcggttggcatggaccatgatgccgacgccggccggcacgaacagcagcgacaggtgcttgagcagctcagtggtggtgccctggatgatgggcagcaggcggtcgtcgaaggcgagccagccgaacagcaggatcatacccagcacggggccgggcaccggcagggtcagcgcgtagctgatcacctcaccgatggactggaaaaccaacaggattgcaaaggtctggagcatgggggcgtggcgtttggtcgcaggtgcgcggcgcgcgtccggaagggatgcgcgctgccgcccatgctgcccgcccgcgctagccgagcatcttgtcgaccagttcgatccagtgcatcaccggggtgccggtgccgccctgcaggtgcgcgatgcagccgatattggccgagacgatggcttcgggctgcgtggcctgcagtttggcgagcttgtcgtcgcgcaggcggtaggccagttccggctgcaacaccgaataagtgcccgccgagccgcagcacaggtggctgtcagcgcagagtttgacttcgacgccgaggccggtcaagagcgcttcgactttgccgcggatctgctggccgtgctgcagcgtgcagggcgggtggtaagccacgcgccggttgtcgcgcgggaccgcgccggccagggtgtgcagctcgtcggcaaagtccggcaagacttcggacaggtcgcgcgtcagcgccgagacgcggcgggcgcgctcggcgtacttcggatcgttgcgcagcaggtggccgtagtccttgaccatcgcgccgcagcccgaggcggtcatcacgatggcctcggcgccgtcctcgatatgcggccaccaggcatcgatattgcggcgcatattgtcgaggccgccgtcgtggtcgccggtgtggaagcggatcgcgccgcagcagccggcttcgcgcgccaccagcagttgtacgccgacacggtcgaacacacgcgcagttgcggcattgatgttgggcgacattgccggctgcacgcagccgtcgagcaacaacatcttgcgtgcatgcgcattgcgcggccacgtgccgggcgcggcggtgctggacagcgccggcaccttgttgcgcagcgtgcccggcagcagcggccgcaccatctggcccaggcgcagcgccgtgccgaacagcgcagggcgcgtcagcccctcgcgcagcacccagcgcgcgatgcgctcgcgggcggggcgctgcacgccttcggcctcgagcttgtcgtcgaccagcttgcggccgatatcgaccaggcggccgtagcgcacgcccgacgggcaggtcgattcgcagttgcggcaggtcaggcagcggtccaggtgcaggcgcgtgctttcggtgatggcatggccttccagcacctgcttcatcaggtagatgcgcccgcgcgggccgtccagctcatcgccgagcaactggtaggtggggcaggtggcggtgcagaagccgcaatgcacgcagttgccgacgatggatttggcttcctcgccttcgggcgtgttgcgaagaaaatcggccaggttcgtttgcatggtgtggggaggttgtgccggggggatgcctggacgtgccgggtcagagcccggggtacatgcgctgcgggttgaagatgccggccgggtcgaaggtctctttcaggcggcggtggatcgcggccagcggcgaggccagcggcgtgaacacgcccactgacttgtcgccattgcggaacagcgtggcatggccgccggcggcctgcgccacggcgcgcacgctttcggcatcggtcttgtcagtgccgtcctcgggcagccaccagcgctggccgccgccccattcgatcagctgtgggcccggcagcgccagcggcgcggcgatggtgggcacggccaggcgccacagcgcgcggcccgcctgggcgggggcgaagaacgggtgggtctgctcgcgcagcgattgccacagcgccgcggcttccgcagcgtccacgcgctcgccgcccagcctgacgcacgcggcgcgcacggcggcggtggcgccggccaggcgcacgtgcagcacgcccgcgtgccaggccgaagacgccagcggcagcggctggccgccccaacggttcaggtgctcgatggcatcggcctgcgccagctcgaagcgcagcgtggcctcgtcgaacggtgccggcagcaccttgaccgacacctgcaggatcagcccgagcgtgccgagcgagcccgccagcagccgcgacacgtcatagcccgccacgttcttcatcacctggccgccgaagtccatcacctcgccgcggccgtccatcagctgcgcgcccagcatgaagtcgcgcagcgcgcccaccgactgccggcgcgggcccgacaatcccgcggccacggcgccgcccagcgtcgcggtgctgggctggcccggcagtgcgaaatggggcggctcgaaggccagcatctggcgcttctcggccagcgccgcctcgatctcggccagcggcgtgccgcagcgcgcggtgatcaccagctcggccgggtcgtagtcgacgatgccggcataggcgcgcgtgtccagcagctggcccgcggcgggctggccgtagaagtccttgctgccgccgccgcgcagccgcagcgcggtgcgggtctcggtggcttgcctgacggcgtcgcggatggcgtcgagggtggcttgcatatgcgtcgtggggtagggaaggccggctcaggagccggcaggtccgccgggcacttccggccggtcgttctggtattcgggcagctggctgccgcaatgcttgcagtagccggcgtcgggttcgtggccctcggtcaggcaatgggtgcaggtgcgcgtggtgagcggccgcttcaggatgctggcggccagctcggcgccgacgataccggtggggaaggcgatgatgccgtagcccagcaggatggtcagcgaggtgatgaactgccccagcggggtcttgggcaccatgtcgccgaagcccgtggtggtcagcgtcaccaccgcccagtacatgctgaccgggatgctggtgaagccgtgctgtgggccttccaccacgtacattaccgtgcccaggatcaccgtgatgatgaacaccgtgcccaggaacacgaagatcttgcggcggctgttgaccagcgcgcggtacaggatctcggcttcctcgaagtacacggtcagcttcaggatccggaacacgcgcagcagccgcagcaggcgcacgtcgatcaggaaatgcagctcgggcaggaagaaggccagccaggtcggcatgatcgagacgaagtcgatgatgccgtagaagctgaacacatagcgccacggccggcgcaccaccaggatgcgcatcacgtactcggccgtgaagaacagcgtgaacatccattccagcacggtgaacgccagccccaggcggttgttcaccgcgggcaggctgtcgagcatcaccaccgtcacgctggcgacgatggccagcagcagcgcgacatcgaagagccggccctcgcgggtatcggcctcgaagatgatggtgtaccagcgctggcgccagccggcctcgggctgccccaggcgctggcggacgaacgcttcctgctgctggcgtcggcgtgggctggacatggcgtggctcagaagcgcggcagttccgggtgcggcagcaggccccgcttcacatgcatcttgccgtactccgcgcagcgcgccagcgtggggatggccttgtccgggttgagcagccgcgccgggtcgaaggcggccttgacgccgaagaaggcatcgcgctcggcgggcgagaactgcacgcacatcgagttgagcttctccacgcccacgccgtgctcgccggtgacggtgccgcccagttccacgcaggtttccaggatgtcggcgccgaacagctcggcgcggtgccattggtcctggtccgcgccatcgaacagcaccagcgggtgcatgttgccgtcgccggcatggaacacgttgatgcagcgcaggccgtacttttgctccatggcttcgatgcgcctgagcagcgtgccgatgtgcttgcgcggaatggtgccgtccatgcagtagtagtccggcgagatccggccggcggcggggaaggcgttcttgcggccgctccagaagcgcaggcgctcggcttcgttctgcgagaccacgatgcgggtgcagcccgatgccgtcagcaccgcgctcatgcgttcgatttcctcggccacttcttccggggtgccgtcggattcgcacagcaggatggcggcggcatccaggtcatagcccgcatgcacgaactgctcgaccgcggcggtggcgggcttgtccatcatttccagtccggccgggatgatgccggcggcgatcacgtccgccaccgcattgccgcctttctcgacatcgtcgaagcaggccatgatcacctgcgccagctgcggcttggggatcaggcgcaccgtgacctcggtgaccacggccagcatgccttcggagccgatcagcacggccagcaggtccaggcccggcgagtcgggggcctcggagccgaacaccaccacctcgccctccatcgtcaccgcgcgcacgcgcagcacgttgtgcacggtcaggccgtacttcaggcagtgcacgccgccggagttctcgctgacgttgccgccgatggtgcaggcgatctgcgaggacgggtccggcgcgtagtacaggttgtggggtgcggcggcgtcggagatcgccaggttgcgcacgcccggctggaccaccgcggtgcgcgagtacggatcgaccgacaggatgcgcttgaacttggccagcgacagcaccaggccctcggcgatcggcatggcgccacccgacaggctggtgccggcgccgcgcggcaccaccggcacgcccagcttgtggcacaggcgcaggatcgcgcagacctgttcctcggtgtcgggcagggccacggccatcggcacctggcggtacgcggccaggccgtcgcattcataggggacggtgtcttccggcttccacagcagcgcggcatccggcaggatctgcgccaggccggccagcagcgcgctgcggcggccttcggccgtggcatgggcgccgtcgggggcgatggtttgggcttcgtgcggggcattcatgaacgactcctgtggggcctcctggatggcggccggtgcgcggcctgccggtcgcggcaatgcagggcctgccgcggggacgggtgactatagcgcagggcacctggcgcgggcaccacgggacacgtgaaatccgcatggcaggccgatcaaaaatgctcatcatggctgcgcgggaaatcactcctggcaggcgacgcaagtccagcgtacaccgcagcgcgggtgcagggaaggcggtccggccggactcagcgtgccggcggctgcggcaggaagcagaccatgtcgagcttgtcgtggaagtgcggcgcgacgtacagcgcatccggctccagccccgtgcgcacgaagccgagcgactcgtacagccgcaccgcgcccgtgctgccggcattgacgcacagcgtcacctggcgcacgcccggcatggcggcggcctgttccatggcccgctccatcagcgcgcggccgagcttgcggtcgcgccagcccggggccacgtacatgccccagataaaggccttgtgccggtgcttggcgttttcctcgcgcatcaccccgaccacgccggccagcgcgctgccatcgctgccgtcgacaaaggcgccgaatacggccttgccctcggtcgcggccaggcgcccggcgacgacttccagcggccggtcctgttcctcctccaggctggaagcgaaggcttccggcgcttcggccaggccgtgcagccgcagcgcctggaaggcggcggcatcggcgggggtcagcaagcggatttccatggggtcagtctcctaccagtccaggctcagcagccagtcgacgaaatagcgcgcctcgggcttgagcggggcctgttcgcgctcgacgatgtagtagccgtgcggcgagaccgattccacctccagcagccgcaccatctgccccagcgacagccagtgccgcgccatgcgctggcgcaccagcgccacgccctggttggacgcgatcgcctccagcatcaggccgatgtcgttgaactgcggcccggtctgcggctcggcccaatccagcccggcagtctcgaaccacggcttccacggctccagcggactgcgcagcagcaccaggccgtgcaggtgctcgggcttggtgatggcgcggccgttgacgcgctcgtagtactcgcgcccgcacgccgggaacaccggctcgaccagcagccgggtggtcttcaggtcagggtagcggccggtgccgtagcggatctcgacatcggtgtcctcggccttgacgtccaggaacgggatcgccaggtgcagctcgaggtcgatatgcggatacagcgcgccgaactcgggcaggcgcggcaccaggtgctggcgcccgaaggtgggcgggatcgccacccgcagccgggtgcgcagcttgttgtattcgggccgcgccagctcgttgagcgacttgagcgcgtcctgcacgttgcgcagatagcgcgtgccggcggcggtcagccgcagcgccgcgttggcgcgcacgaacaggtcttcgccccacagctcctcaagattcttgatgcggtgcgagaccgcgctgggcgtgaccgacagctcttcggccgcgcgcgcgaagctgcccaggcgcgccgctgcctcgaaggcgatcagcaggtgcagcggcgggacgcggttgaacatggaggccatcagctcggcacgccttactgcgagccgccgcgcgtggcgctgaagatcttgcccgggttgaggatgtgcttggggtccagcgcgtccttgatcgcgcgcatcacgtcgagcgcatcctcgccgtgttcttccaccaggaagcgctgcttgtgcaagcccacgccgtgctcgccggtgcaggtgccgcccatcgccagcgcgcgttcgacgatgcgctggttgatggcctcggcctcggccatctcttcgggcttgtcggggtcgaccaggatcgccacgtggaagttgccgtcgccgacatggccgacgatggggcagggcagcgccgaggcgttcaggtccttctcggtctcggtgacgcagtcggccaggcgcgagatcggcacgcacacgtcggtggtcaccgacttgcagcccggcttgagctgcagcatggcgaagtaggcggtatggcgcgcgttccacagccggctgcggtcctccgggcgggtggcccactcgaagccctggccgccgtgctcggcggtgatctgctgcacggtctcggcctgctcgcgcacgccggcctcggtgccgtggaattcgaagaacaggtgcggggtctcgggcagggtcaggttgtcgtggcggttgatggcgcggatcgccagcgcatcgacgaactccacgcgcgccaccggcacgcccagctggatggtctggattaccgcctgcaccgcgctgcccatgctggggaaggcgcacaccgcggcggagatcgcctccggctgcgggtagagccgcaccgtcacctcggtgatgatgccgagcgtgccttcgctgccgataaagagccgggtcaggtcatagcccgccgccgacttgcgcgcctgcgtgccggtgcggatcacgcggccgtcggcggttaccactgtcagcgccagcacgttctcgcgcatggtgccgtagcgcaccgcgttggtcccggaggcgcgcgtggcgcacatgccgcccagcgaggcgtcggcgcccgggtcgatcgggaagaacaggccggtgtccttgatttcctggttcagctgcttgcgcgtgacgccgggctgcacggtcacggtcaggtcctcgggctgcaccgccagcacgtggttcatctgcgacaggtccagactgatgccgcctgccacggccagcagatggccttccagcgacgagcccgcgccgtacgggatcagcggcacgccatgctggttgcacaggcgcgccacctcggccacttcctcggtgctgtgggcgaagaccacggcgtcgggcacggccggcgggaacggggattcgtcgcggccgtggtgttcgcacacgccggcggaggtggtgaagcggtcgccgaagcgcgccgccagggcttcgctgaaggcgggcggcagcggacggcgggcgagcgtggcggacggcgtggggtggttcatgcgggtctccggcgggtcggcgcgacggtggtgccggcggcggcgctgcggagcaagctccggtctggccggcaggggcgcgacccggttatcgaatgggcgacgaatgggggctaccggcattctacgccgcgcggcggctcatgcaccctggccgggcactgcggcggccggtactggccgatagccgcacagcaagcgccgggacacaagcgcttggcgcgccgaggcggtccggcgcgataatgcgtctttcccccgggcgccccgcgttgcagggcggaccacgactaccacacgcttacgaggagaccggcatgggcaaccgcctgtccaagattgccacccgcaccggcgacgccggcaccaccggcctgggcgacggcagccgcaccggcaaggccagcccgcgcatcgccgccatcggcgacgtcgacgagctcaactgccacgtcggcgtgctgctgaccgaggccctgcccgacgacgtgcgcgccgccctgctgcatatccagcacgacctgttcgacctgggtggcgagctgtccatcccgggctacaccctgctcaagcctgagcaggtggcgcagctcgatacctggctcgccgactacaacgccaacctgccgcggctggccgaattcatcctgcccggcggcagccgcgccgcggcgcaggcccatgtctgccgcaccgtgtgccgccgtgccgagcgcgcgctggtggcgctgggcgcggccgagccactgaacgaggccccgcgccagtacctgaaccggctgtcggacctgatgttcgtgctggcgcgggtgctgaaccgggccggcggcggttccgacgtgttgtggcagcgcgatcgcgacgcgccaggaggtatggaataggccactttcggcggccgcgccgcgccgtccgcttaacctgcggcggcggatgccgttgaaagcatgcagaaaccgagaaaattactcggatttgccggttctgcccttgaaaagcccccgggcggccacatttcggcctcaggttgaattgcagccgcgcggatagcgccggctcaagaggagagaataatgggtaagatcatcggtatcgacctcggtaccaccaatagctgcgtcgcgatcctggaaggcaacacccccaaggtcatcgaaaactcggagggtgcccgcaccaccccgtcgatcatcgcctacatggaagacggcgagatcctggtcggcgcgccggccaagcgccaggccgtcaccaatccgcgcaacaccctgtacgcggtcaagcgcctgatcggccgcaagttcgaagagaaggaagtccagaaggacatcggcctgatgccgtattccatcgtcaaggccgacaacggcgacgcatgggtgtcggtgcgcgaccagaagctggcgccgccgcaggtttccgccgaagtgctgcgcaagatgaagaagacggccgaggactacctcggcgagccggtgaccgaagccgtgatcaccgtgccggcctacttcaacgactcgcagcgccaggccaccaaggacgccggccgcatcgccggcctcgacgtcaagcgcatcatcaacgagccgaccgcggccgcgctggcgtttggcatggacaagaacgagaagggcgaccgcaagatcgccgtgtatgacctcggcggcggcaccttcgacatctcgatcatcgagatcgcggacgtggacggcgagaagcagttcgaagtgctgtcgaccaacggcgacaccttcctgggcggcgaagacttcgaccagcgcatcatcgactacatcatcagcgagttcaagaaggaccagggcgtggacctgtccaaggacgtgctcgcgctgcagcgcctgaaggaagccgctgaaaaggccaagatcgaactgtcgagctcgcagcagaccgagatcaacctgccgtacatcacggccgatgcctcgggtccgaagcacctgaacctgaagatgacccgcgccaagctcgaatccctggtggaagagctgatcacgcgcaccatcgagccgtgccgcatcgccatcaaggacgcgggcgtcaaggtcagcgacatcgacgacgtgatcctggtgggcggcatgacccgcatgcccaaggtgcaggaacaggtcaaggagttcttcggcaaggaagcgcgcaaggacgtgaacccggatgaagccgtggccgtcggcgccgcgatccagggctcggtgctgtcgggcgaccgtaccgacgtgctgctgctggacgtgacgccgctgtcgctggggatcgagaccctgggtggcgtgatgaccaagatgatcaccaagaacaccaccatcccgaccaagcatgcgcaggtgttctcgaccgccgacgacaaccagccggcggtgaccatcaaggtgttccagggcgagcgtgaaatggcctccggcaacaagctgctgggcgagttcaacctggaaggcattccgcccgcagcgcgcggcacgccgcagatcgaagtgtcgttcgacatcgacgccaacggcatcctgcacgtgggcgccaaggacaaggcgaccggcaaggaaaacaggatcaccatcaaggcgaactcgggcctgtcggaagacgagatccagcgcatggtgaaggacgccgaggccaacgccgaggaagacaagaaggcccgcgagctggctgatgcccgcaaccaggccgacgcgctgatccactcgaccaagaaagcgctcaccgaatacggcgacaagctggaagccggcgagaaggaaaagatcgaagccgcgatcaaggaactggaagacgccgctcgcggcggcgacaaggccgagatcgatgccaaggtcaacgcgctgtccgaagtcagccagaagctgggcgagaaggtctacgccgacatgcaggccaaggctggcgaaggcgccacggccggtgctgctgccggtgccggcgcggccggtggccagcaggcgcagccgcaggacgacaacgttgtggacgccgaattcaaggaagtcaacgacaagaagtaatcgggacacgcgggcggcggtgcaggcactggccggcaccgcccccgccccgacgccgggcgcggccatcggacccagcgggaaaccgccgtcggatgcctcgctcggcttttttgctattcgccggtatcgcgccgcatgtgcgtgccggccaaaaaggtttgagccaccatggcaaaacgtgactattacgaagtgctcggggtaggcaagaacgcgagcgacgacgagatcaagaaggcttatcgcaagctcgcgatgaagtaccacccggaccgcaatccggaaggcaaggacggcaagatcgccgaggaaaaattcaaggaggtcaaagaggcctacgagatgctttccgacccggagaagaaggcggcctacgaccagtatggccatgccggtgtcgaccccaatatggcgggcggcttcggcggtgcgcagggctacggcggtttcgccgaggcctttggcgacatcttcggcgacattttcggccagcaggccggtggccgtcgcggcggcggcggcccgcaggcctatcgcggcgccgacctgcgctacagcatggagatctcgctggagcaggccgcgcacggccacgaggcgcagatccgcgtgccgcactgggacgactgcgaccactgccacggcaacggcgcggagccgggctcgagcgtggaaacctgcccgacctgccacggcgcgggccaggtgcgcgtgtcgcagggcttcttcaccatgcagcagacctgcccgaagtgccacggcagcggcaagtacatccccaagccgtgcaccaagtgccacggccagggcaagctgaagtcgcagaagacgctggaagtgaagatcccggccggcatcgacgaaggcatgcgcatccgctcgtcgggcaacggcgagccgggtatcaacggcggccccccgggcgacctgtatgtggaagtccacatcaaggcgcacccgatgttcgagcgcgacggcgacgacctgcactgccagatgccgatctccttcgccaccgcggcgctgggcggcgacctggaagtgccgacgctgagcggcaaggccaccttcccggtgcctgaagccacccagtcgggcaagaccttccgtctgcgcggcaagggcatcaagggcgtgcgttccggctatccgggcgacctctatgtgcatgtgaacgtggagacgccggtcaagctgaccgaggcgcagaaggagatgctgcgccagttcgaccgctcggtgcatgagggcggctcgcgccacagcccgcaggagcaatcctggctggacaaggtgaagagcttcttcagctgaccgggtttgcagtatcggaccggccacgtgcgagcgtggccggttttgtttttggcgcgcgataatgccaaggttgtccccaccgcccctttcctgacgatttccccgtggtagccagcatccagcccccgccctctcccccggcccctctcccgcaagcgggcgaggggagcacccagccagggggaggagatgtcttcgtccttctcgacgacgccacggccccggcggcgcaagccgcatcacgcctctacaccggcttcatccgtgaagacgtcttgcccgccggcagcgacatcgcgcaactcgacaccatgcttgccgaaggctggcgccagggctggcatgccaccctgtttgccccctacgaattcggcggcgcgctggtcgatgccccggtgcacaccggcaacgcgatgccgttccacgacggcgcgctgcgcctgctgtggttccgcaacctgcgccggctcgatgccgcggcggtcacggcgtggctgcaggcgaaagccgaccccaggccggcgggcctgatggacgtggcctccgatacctcccgcgaggcattcgacgatgccatcgcccgcatccaccagtggatcgaagccggcgacacctaccaggtcaactacacccagcgcctgcacttcgatgcctttggcgacccggtggcgctgtatgccgcgctgcgcgccgcgcagccggtgccgtatggcgtgctggccagcctgccggatcgtgccacggtgctgtcgctgtcgcccgagctgttcgtgcgccacgacggccagggccacatgctgacccggccgatgaagggcaccgcgccgcgctcgggcgatgccgtgcgcgatgcgcaggccgccgccgcgctggccgccgatgccaagaaccgcgccgagaacgtgatgatcgtcgacctgctgcgcaacgacctggggcgcatcgcgcagccgggcagcgtggcggtgccggagcgctttgcggtgcagccgtttggcgcggtgctgcagatgacctctaccgtcaccgcgacggcgcggcccggcacgcgctttggcgcgctgatggcggcgctgttcccgtgcggctccatcaccggcgcgcccaagcggcgcaccatgcagatcattgccgaactggaaggcacgccgcgcgggctgtacaccggggcgatcggctggatcgatgcgccaaccgacgaaggcaccgcgggaccgttcgcgctgtcggtggcaatccgcacgctggtactggcgcctctcgcggataccggcctgcgcgcgggtgaaatgggcgtgggcggcggcatcgtccatgacagcgtcgcggcggaggagttcgatgaatgcggctggaaggcgcgtttcctgacgcggcacgatcccggttttacgctgttcgaaaccatgcgcgtgcaggacggcgagtgcctttacctggcgcggcatcttgcgcgcattggcgcttcggcacatacgttcggcttcgctttcgatgccgatgcggcacgcaacgcggtggccgcgcaggtagcgcagctgggcgcggggacatggcgcctgcgtatgagcgtggacaagcgcggcgcgctcgcatttgccagcggcgcggtggcaccgatgccggccggtccggtcaggatcgatatcgcccccgagccactacccgccgccgatccgctgcgccgccacaagaccagcgcgcgcgcagtgttcgatgcgggctggcaggccgccgagcgtgccggtggctttgacctgctgttcttcaacacgcgcggtgaactgctggaaggcgggcgcagctcggtcttcgtccgtatcgatggccgctggctgacgccgccgctgtcggctgacatcctgcccggcgtgatgcgcgcggtggcgctggacgagggaggggcggccctgggcgcccccggcgaagtggtgacggaagcggtgatcacgcgcgcgatgctcgcgcgcgccgaggccatcgtcctggtcaacgccttgcgcggcgcgatgccggcgacgctgagtcagtaagcctgaagactaagggtggtgcgtgtccaggacgccgtcgcccagcttccagcgcaccacgcccggcaggttgatcagctcgcggtcgtggcagatcatcaccacggtgcggccttcggcggccaggtcgccgaccagcccaatcacctgttcgcgcgcatggccgtccaggctcgaggtaggctcatccagcagcagcaactccggctccagcaccttggcgcgcgccagcgccacgcgctggatctcgccgcctgacaggtattcgggcgcggtgtcctgcaggtgcgacacgccggcccagcccagcgcctcgcccacgcggcgggcgatctcgtcgcgcggcatcccgcgtgcgtgcaggccgtaggcgatgttctcgcgcactgaggtgcggaacaggtacggatgctggtgcaggtaggcaatgcgctggcgcaacgccggcggcagcggggagaggggggcgtcgtgcgcctggccgtgcgcgtcggtccactgcgcgctggcgccgggtgccggctccagcccggccagcatgcgcagcagcgtggtcttgccggcgccgttcatgccggtcagcacgatcgcggtggcgcgcgggatcaccagcctgtcgatggcaaagagcttgcgcaggccgatggtgcgcgccagccctcgcacggtcagcagcgggctgtggtcatgggcaactgagggggtcatcggcggaagcctccggcaccctgcagccaggccatgccgatattgaccagcagcgccagcgccaccagcacgatgcccagcgcaatgccctgggcgaactcgcccttgctggtttccagcgcaatggccgtggtgatggtgcgggtcgagccttcgatattgccgccgatcatcagggccgagccgacttcggcaatcacgcgcccgaagccggcgaccactgccgccatcagcccgaagcgcagctcgcggatcacggtcaggaaggtgcgccagcggcctgcgcccagcacccaggcggtctcgcgcaggcgcacgtcggcgccctgcagggtcgacagcgcaaacgccagcaccaccgggaagccgatcacagcctgccccagcaccatgcccgccggcgtgaacagcaggtgcaggctgcccagcgggccctggcgcgtcagcagcaggtagaggaccagcccgaccagcacggtcgggaacgacaggaaagcctgcgccaccaccaccaccgcacgccggcccgggaactgccgggtggcgatcagccaggccgcggcgatcgccggcaccgtggccagcgccagtcccagcaccgccaccatcagcgaggtccagacgatgaaccacaggccagcgtcgccgctggccagcaggcggaaggcgtcggcggtggcggtgccgatctccaccggctcaggcggagaaggtgtgctcggcggcggggaagctgccgtccttgacggcggccacgtaggcgcgcacggctgcctcgatcgaggtctggccgtccatgaagttgcgcacgaacttggccttgcggcccgggtagacattgagcatgtcctgcagcaccagcacctggcctgagcagtccgcgcccgcgccgatgccgatggtggggaccgtcagcgattgcgtgatctcgccggccagcgccgcgggcaccgcctccatcagcaccacctgcgcgccggcggcctgcagcgccagcgcgtcgcgcttgagctgggccgcgccggcgttggtcttgccctgcaccttgaagccgcccagcgcgtgcaccgactgcggcgtcaggccgatatgcgcgcataccgggatgctgcgctcgaccaggaacttgacgatgggcgccagccagtcgccgccttcgagcttgaccatctgcgcgccggccttcatcagcgtgaccgcgctggcaaacgcggcctcaggcgtgggataggtgccgaacggcaggtccgtcagcagcagcgaggtctggttgccgcgcgccgcgcattcggtgtggtaggccatctgttccagcgtgaccggcagcgtggtctgctggccctgcatcacattgcccagcgaatcgccgaccaggatcatttccacgccgcagtagtcgagcagcgcggcgaagctggagtcgtacgcggtcagcatggcgattttctcgccggcgtcacgcatcgcctgcagtttgggaatcgtgatggtcttgcgggagggatcgaggaggtagctcatggcagtgcccatataggacggctttgccggtgccgggagggccgcccgcacggcaacgacagccgtcgttattgtgttgggtctggcaggcgtggcctgtcagggcgcagcgagattgagaaaggccttgcggccgcgcatgttttcgatgcgcgacagtagtgtacggaaatcgtcatcattgtccaccggattgaagtgggcggtgtcgaccaccatcaccggggcgtcgtcgtaccggtggaacaattcgccgtaggcgccggccaggcgctgcaggtagtgttcgtcgatgccggcctcgccgggctcgccgcggcgcacgatgcgctcgcgcaggagcgacggggtggcctgcagcacgatcaccaggtcggcgcgctgcggcggcaggtcaaggcgtgcggcgatggcgtcgtagagcgccagttcgtcgtcggacagcgtcagcgccgcgtgcagccggtccttggccatcaggaaattggtgaccatgcgctgtccggccagcacccccgcctgccattgctgcagttgcaccgcgcgctgggtcaggcaccacagctgcagcgccagcgcatggcgcgcgggatcgcggtagaagggttcgaggaaggggctgcggcgtgcgctgtcgggcagctcctgggcctgcagcgtgcgcgccaggcgctgggccagcgaggtcttgccggatccgacggggccttcgacgacgatgcggcgcaggtgatcgagcatggcgctccgggcttcagtggggtggaaggctgcgccgcgggcgcagccgggcgggatcagccagggctgccgccatcgccggtctcgccagcggcggcctgcatgcgcaggcacttgcaggtggacaccttctcgatacgctgcgcgcccacgccggccaggtagtcggcggcgcgtccgcgcccggggatggccagcgcggcgtccagctccagcagcggcaccagcgtgaaggcgcgctcggtcaggcgcggatgcggcaccgtcaggtgctcgtggtcgtgctgctcgtcgccgaacagcagcaggtccaggtccagcgtgcgcggcgcgttgcggaacggccgctcgcggccgaactggtcttcgatgtggtggcagatgcgcaggagctgcgccgcggtgaacgaggtctgcaccttgaccaccgcgttgtagtagtcgtcgccgccggcatcgaccggggcggtgcggtagagcgatgagcgcgccagcaccgtgatgccgacctgctgggccagacacacgatggcgtccttgatggcctggcgggcatcgccaagattggccccgatgccgatgaaggcaagcgtcatttaggtttcctccggctggccggggccggcatgtgctgcctcgcccgcgtccgtgtcgctccgggaagacactttatccgatttccgcggaccgcgccggcggcgcttcttgcgtgccgggccttcgccctcggcgccctggccaccctgactgccatgaccgccttgaccaccagggccgcgcgcgctgcgtaccgcgtcgatcaggtcctcgcgctcgcccgggtcggcgtcctggaagtcctgccaccaggcggccagttcctcgggcagctcgcccgactggcagcgcaggtgcaggaagtcgaagccggcacggaagcgcggcgactccagcagccggaacggcatgcggcccacgcgcttttcaaagcgcggctgcatgccccagatatcgcgcatgtcggtgacaaagcggcgctggatcgccagctggccggtctgcttttccagcaccatgtccatggcggtgttcagcgcggcgatggcgtgctcgccctcctcgcgcagcctggtccagcgctgcagcacgtggtgccacagcagcgcggcgaacaggaagcccggcgagaccggcttgccggcctgcacgcggcggtcggtgttgtccagcgccagctgcacgaagcgctggcccatgggctgctccagcgccacgtccagcagcggcagcaggccctggtgcaggccggccttgcgcagctcctgcagcgaggcccaggcgtggccggacatcagcagcttgagcatctcgtcgaacaggcgcgcgctgggcacgttgtggatcagcgacgccaggccggcgatcgggtggcgcgtggcctcgtcgatgtcgaagctggtcttggcggcgaagcgcaccacgcgcagcatccggatcgggtcttcgcggtagcgcgtgaccgggtcgccgatcatgcgcagcgtgcgcgcgcggatgtcttccatgccgtgatggtagtcatgcacggtctgcgcggccgggtcgtagtacatcgcgttgatggtgaagtcgcggcgttccgcgtcttcggcctgcgagccccacacgttgtcgcgcagcacccggcccgaggcatcgatcgcatgggtcttgctgtcgagctcggcgcgcttgaggcggcggccttcgggcagcgtttcgctggcgatggcgtcgaccagcgcgcggaaggtcgagacctcgatgatttcctgctcgcgcccgccgtagaaggtcacgtgcacgatctggaagcgcctgccgatgatgcgcgagcgccggaacagcgcctgcacctggtcgggcgtggcgttggtcgcgacgtcaaaatccttgggcttgatgccgagcagcaggtcgcgcaccgcgccgcccacgatgtaggcctggtagccggcctgctgcagcgtggaggtgaccttgacggcattgcgcgacagcagcgcggggtcgatctggtgttcgtcggcgccgacgatgcgcggcgtatgggcgcggccggtgcggcgcagcttggggctgggtttgcccagcagccgggtaatgagcttcttgatcacgtcagaacagatccatgatgcgccagccggccgcggcggcgtggtggcgcaggcgatcgtccgggttggtggcgatcggctcggagactttttccagcaagggcaggtcgttggccgagtcgctgtagaaggtggtagtttcgaagtggtcccactgcgcgccctggctcctgagccaggattcgacgcgggtgatcttgccttcgcggaagctgggcacgccgtggacctcgccggtgaactggctttccggcttgccgtcgatggtggcgggctcggtggcgatcaggtgcttgatgccgaaggccgcggcaatcggcgcggtgacaaagctgttggtggcggtcaccacggcgcacaggtcgccggcttccaggtgcttgtagaccagcgcgcgcgcctgcggcgtgatcaccgggtcgatcacctcgtgcatgaagcgcacccgcatggcatcgagccggtcgcgcgggttggccgccagcggcgccagcgcaaagcgcaggaaggcctggatatcgagggtgccggctttgtagtggccgtagaactcgtcgttcttctgccggtaggtttcctcgtcgacgacgcccaggcggaccaggaagcggccccattcatggtcgctgtcggtcgggatcagggtgtggtcgaggtcaaagagtgccagattcatgggcggcgattttaccttaaggcgagaggtcgggcgggcaggcaggcaggcgccggggccgcattgggtgcggtatgggcgccgatccggcgctaatcccggaattcagcaaacatttcacgcagcagcggcagcgtcaccggccgcttgcgttccagcgagtaggtgtcgagcgcgtccagcagcgccatcaggcttggcatgtcgcggtaatgccgcgtcaccagccagtgcgtaatctccggcgacagctgcaggccgcgctcgcgtgccgcatgcagcacagcggccttcttgtcgtcgtccgacagcggcgcgacctggtacaccaggccccagcccaggcgcgtgcgcaggtcttcgcgcaccggcatcgcgcgcggggccaggccgccggccaccaccagcgcggtgcgcacgtgggcgcgcacctcgttgtagagcgaaaacaccgcgatctggcgcgcttcatccagcagctcgacgtcatcgacggtgtagagctggcaccacgggtcgaacaggaagtccgacagcgggtggtgtgggctcaggtagcggctgcggatgccgtgctgcggcccggcctcacatagcgcgtgcagcaggtgggtacggccgcagccgacctcgccccacaggtagaccagccggtcgctggcgtgctcctgggcgagcgcggcgggcagttcgcgcaggcgctgcaccgcttcgcggttggatgccaccacgaaattctcgaaggtcgaaggcggcgggctgcccagctcgagcgacagttgcttgggacgcggggacatgacgtatggctaacttgcgggtgtgggcagcagtggggcagccgttattttcggtacaggtcgctggccaggtaaacccgccgcagctgccgcgcaccgaccagcagcacggcacaggtcggcagcgccagcagcacgccgaagaagccgaacagctggccgaaggcgagcagcgcgaagatcaccaccagcgggtgcaggccgatgcgttcgcccaccaggcgcggggtcaggtaaaagctctcgataaactggccgaagccgtagaccaccgccaccgcggccagcccgtaccagttgccgaactgcagcagcgcggccaggatcgccatgaccagcccgacaccaaagccaatatacgggataaacaccgccagtcccgtgaagaccccgaccggcacgccgatatcgaagccggcgatggtcagaccgatcgagtagatcgccgccaggatcaccatcaccaggatctggccgcgcaggtattgcgacagcagcgcgtcggtctcgttggtcagttcgcgcaccttgggcacccagcggcgcggcaccacgccctcgatgcggcgcatcaccatgtgccagtccatcatcaggtagaacatgacgatgggcacgataaagacgatgccggccaccgtgatcagcgccgagcccgacatcttgacgtagttcagcaacaccaccagcaggtcttccgggctggccgagaagcggtccgacagcatgttgcgcaggcccgggaagtcaaagcggatgcgcacgccgaactccgccagccggggcgagaccacggagttgagcttcttcagcaggatcggcaactgttcgcggatctgcgggatctcgcgttgcagcaccgcgattgccagcagtaccagcatcacgcagatcaccgtcagcagcaggatcatcagcgtcacgccgactgcgcgcggcacccggcggcgctgcagccagtccacgcccgggttcaggacataggcgaagatgaacgcgaacaggaacggcgtcagcaccggcgccagcgcgatgatggcggcgaacagcgcgacggccacgacgacccagagcaggatacgcttggcctcttggttcaacagcggggcattcatcaatagttgggaaggacgggcgactgcgccgtttgcggcggaatctcgccggaaactggaagcggggggcctctatccgttaaaattgcaattctactggactcgcgcccgcgttccgatgccaagcaacggaagccgcggtggcccgagcgccggattcctcactttatttcctccaggacaagcaggttcccatgagcgcatccccgaccgccggccaggcaggcctttcctaccgcgacgccggtgttgatatcgatgccggcgacgcactggtcgaccgcatcaagccgtttgccaagcgcaccatgcgcgaaggcgtgatggcgggcatcggcgggttcggtgcgctgttcgaactgtcgaagaagttccaggagccggtgctggtatcgggcaccgacggcgtgggcaccaagctcaagcttgcgttccagctcaaccgccatgacaccgtcggccaggacctggtcgccatgagcgtcaacgacatcctggtgcagggtgccgagccgttgttcttcctcgactacttcgcctgcggcaagctggacgtggacaccgccgccaccgtgatccagggcatcgcccgcggttgcgaactggccggctgcgccctgatcggcggcgaaaccgccgaaatgcccagcatgtacccggacggcgaatacgacctggccggctttgccgtcggtgcggtcgaaaagaagaagatcatcgacggcagcaccatcaccccgggcgacgtggtgctgggcctggcttcgtcgggcgcgcactccaacggttactcgctggtgcgcaagatcatcgaagtggccaggccggacctgaacgccgacttccacggccagcgcctgcaggacgcgatcatggcgccgacgcgcatctacgtgaagccgctgctgtcgctgatcgaaaccctgccggtcaagggcatggcccatatcaccggcggcggcctgaccgagaatgtgccgcgcgtgctggcgcaggacgtcaccgccgtgctcaagcgcgatgcctggacgctgccgccgctgttccagtggctgcaggcgcagggccgcgtggccgacgacgaaatgcaccgcgtgttcaactgcggcatcggcatggtcgtgatcgtggccaaggaagacgctgaacgcgccatccgccacctgcaagcggccggcgaggccgtgtggcagatcggtgagatccgcgaacgcgccgagggcgaggcgcagaccatcgtggtctgacgacaccgaagccttccggcaagaacggcgcatgccttagggcatgcgcttttttttttcgtcctgcgtacggctcataagggtttacccaaaggctcacacccgctttgtgccctgcgctggccgagtcccgttttcgtgcatcgcaccaaaatccagcatgcatctgcaccaagtctgataaacaatattttgcttgattgtatggcggtttatcgcctaatgtactgagcaaagacgcagcacacgtatgccgcgtccggagacaacgcctccgcgcgatgccggcaaccaccggcggcgctgggggcaggccaggaccattggaggatccaccatgcaagcagtcagcatcgacgcagcggcaaaaggcgcgtcggcccagaagcagtccgtcgcgcgcgtcgcgggggccagcctcgccggcaccacgctcgagttctacgaccacttcatctacggatcggccgccgcgctggtcttccccaagctgttcttcccgcagagcgacccgctgaccgcgacgctgctgtcctttgccagctacggcgttgccttcgtggcgcggccgctgggcgcggcgatcttcggccacttcggcgacaagatggggcgcaagtccatcctgatcattacgctgctgatgatgggcctggccaccttcggtatcggcctgctgccgacctatgccgccgcgggcgcgctggcgccggtgctgctggtgctgctgcgcgtggtgcagggcctggcgctgggcggcgaatggggcggggcggcgatcatggtcaacgagctcgaccctgaagggaaaaggcgcggcatcctcggcagcctggtgcagctcgccgcgccgatcggcctgctgcttgccaacggcgtattcgcgctggtgacctggcaggtctcggaagaagccttcctgagctggggctggcgcgtgccgttcctgctgtcggcgctgctggtgggcgttgggctctacatccgctccaacgtgcgtgagtccggcatgttcgagaagctggaggaatcccacgccgaagcgcgcgcgccgatcatggaagtgctgcgcaactacaagaagcagctgctgatcgcctttggcgcgcggctgggcggcgatatcgccttctacgtgttcacgctgttcctgctgtacttcgtgccgaccaagctgggcctgcccaagagcatcgcgctcaatgccgtgctgctgggtgcggtggcgcagatcctgttcatcccggtggccggttacctggccgaccgcatcgggcgtcgcccggtgctgatgatcggcggcatcggcggtgcggtgtgggcctttgtcttcttcacgctggtcaagaccggcagcccggctttgatcatgctggcctcgttcgtcggcatggtgctggtgtcgttcatgttctcgccgctggcgtcgttcctgccggagctgttcgccacccgggtgcgcgtgaccggtgcctcgctcggcttccagttcgccggtgtgttcggcggcgcgctggccccgctgatcgcggtgggcctgctcgaccgcttcggcagcaccgcgcccgttgcgctgtacctggcggcggtgtgcgcgctgatcgcaatcgccgcggcggccgcgcgggaaaccaatcgcatgcacctgtccgacgcggaccgctgaatgcggaccacggtgagcggcagtaacaatcttctcgtgagcagtatcgtgaaacagttcgacctgatcatccgcaacggcaccgtcgtgaccgccagcgacaccatgcagtgcgatatcggcatcgccggcgggcgcatcgtacagctcggccacgacctgggcgaggccgcgcagaccatcgacgccagcggcaagctggtcttgccgggcggcgtcgatgcgcactgccacctggaccagccgatgccggacggcctcaggatggctgacgacttcggcaccggctcggtgtcggcggcctgcggcggaaccactaccgtgatcccgttcgccgcgcaggagaagggccattcgctgcgcgccgcggtgaacgactaccaccagcgcgccgatggcaaggctgtggtcgactacgccttccacctgatcgtggccgatcctaccgaggcggtgctgcaggacgaactgccggggctgatccgcgagggctattcgtcgttcaaggtctacatgacctacgacgacctcaagctgaacgaccgcgagatccttgaggtgctgtcggtggcgcgccaggagggcgcgctggtgatggtgcacgccgagaattcggactgcatcgcctggctgaccgagaagctggaagcggcgggcaacaccgcgccgaagtttcacgcgctggcccggccgatggcgatcgagcgcgaggccacgcaccgcgccatcacgttctcggagctggtcgacgtgccgatcctgatcgtccatgtatcgggcaaggaagcggtggagcagatccgctgggcgcgcaaccgcggtatgaagatctttgccgagacctgcccgcagtacctgttcctgactgccgaagacctcgaccagcccggctaccacggcgccaagtgcgtgtgcagcccgccgccgcgcgaccgcagcaaccaggaagtgatctgggacggcctggccgacggcctcttcaccattttctcgtccgaccatgcaccgttccgctacgaagacgcgcagggcaagaagcctggcggcaaggaagtcccgttccagtacatccccaacggcatccccggcctggaaacgcggctgccgctgctgttctcggctggcgtggtgggcggccgcatctcggtcaaccagttcgtcgcgctgacctcgaccaaccccgccaagctctacggcctgcatccgcgcaagggcaccattgccatcggcgccgatgccgacctggcgatctgggatccgcagcgtgaagtgacgatccgcaacgccgacctgcatcatgctgtcgactacaccccgtatgaaggcctgcgcgtgaccggctggccggtgaccacgctggtgcgcggcaaggtggtggcgcatgagggcgaggtgctggccgaggccggccacggccagttcctgccgtgcggcctgccggagatggccaggccgcgctatcgcacctcgggcggcagcctgtgacggcagccttgccaatgctttgactgaaacgactgacatggaactgaccaaccgcctggacgccaccactatcgcggcccgcgtcgccgcgggccgcctcgatcccgccgaggtggtcgccgccttccaggctcgcatcgcggcgcgcaatgaccagctcaacgccgtgttcgagcagcgccaggagctggtcgatgccgacctggcgcagctgcgcgcgcgcctggcgcagggcgagcgcccgctgctggcgggcgtgccggtgatcgtcaaggacgtgatctggagccagggccgccgcgtcacgcagggttcgcagctgtatcgcgacttcattgcgcccgccgacgcgatcgcggtcgagcgcctgcgccaggccggcgcgatcgtgctcggcatgggcaatacctcggagttcgcctgcaagggcctgaccaccaacaaggtctacgggctgacgcgccatccgctcgatgccacgctgaccgcgggcggctcgtctggcggctgcgcggtggcggtggcggccggcatggcgccgctggcgctgggcaccgacggcggcggttccagccggcgcccgcccgcgcatgccggcgtggtcggcttcaagccttcctacggcgcgattcccgattcggtcggctttccccatgccttcaacggcatccaggtgattgcgccgatcacgcgcacggtggccgatgccgagctgatgttcgaggcgttggccggcgccgatccgcgcgatcccgatacgctgggcttctcgcttggcgccgcgcgcccgctgcatacgctgaagatcgcggtcagcccgcgcctgggcctggacacgccggtcgacgacgatgtcgcgcaggccttcgagcaggccgtggcccggctgcagggcgcgggcctgaccatcgagcgtgccgacccggcctggccaaagggcgccgacgaggccgcgctgatgccgctgcagcatgtcggcctggccaatctctacggcgaggcctggcgccgcgacccggagctgttcgatcccgacgtggcgcgccagatcgagcgcgggctggcctggagcggcgccgacgtggcgcgcgcgcgcgaagccagccaccagatcgcgctggccgtggccgggttctttacccgctatgacctgctgctgtgcccgaccaccccgtgcgtggcgtggcgcaacgaccggctcgggccggagcggatcggcggcgtggcggtggagccgcgcgcccatgcggtgttcacgcccttcttcaatcatgcgctggcgccggccatttcggtgccctgcggccatggccgcgacgggctgccggcgggcctgcagatcgccggcccgcgcggtgccgaccgcaacgtgctggccgcggccaggctggccgaaagcgtgctggcgccgctgctcaaccctgccggataaccgtcatgcgaatccttgtcctgaatcccaataccagcgaaggcatcaccgcgcggctgatggcggcggccaccgaggccgcggcccccggcaccgagctggtgccgctgaccgccagccgcggcgtgccctatatcgccacgcgcgccgaggcgcagatcggcggcgccatcgcgctggagatgctggccgagcaccatggccagttcgacgcggccatcatcgcggccttcggcgaccccggcctgatgggcgcgcgcgaactgttcgacctgccggtggtgggcatggccgaggcggcgatgctgtcggcctgcatgctgggccggcgctttgccatcgtgacctttgcgcgggcgctggggccctggtatgaggagtgcgtggacatgcatggcctgcgcagccggctggccggcatccgcatgctggacggcagctttgcctcggtgtcggacgtccaggaagagaaggaagccgtgctggtggaactggccaaccgcgccgtggcggaggatgaagccgatgtggtgatcctggccggcgcgccgctggccggcctggccgcgcgcgtgcgcgaccgcattccggtgccggtggtcgaccagatggccgccgccgtcaagcaggccgaggcgctggtcgcgctgcagccgcgcaaggccaccgcgggcacgttccgccgcccggatgccaagcccacgctgggtttgcccgcggcgctggcagcgcgcatcgagcaccgctaagccacttcgccgccgatgacgccgcggctcagaccgcggcgaacaccgcttcgagatcgaccttttcctcagccggcagctccagccgcagcgtgctttcgacatggccgaggtgctccgccatcagccgcgcggcgcgctcgccgtcgccggcttccagcgcatcgacgatgtcgtcgtgttcatggtgcgggcacgacggcacccccggtgcgtcatagagcgcgatgatcaggcaggtcagcgagcacagctcgcgcatgtacttgcccaggtactggttgccggtcatttccgccagcttgcagtggaactcgcccgacagccggatgatggcgcggcggtcgttgctgtcgcgcgcctgcgcttcctggcgcgtggtttcgcgcagcgcgcgcacccccggcgcgccaatggcgccggccaggtcgcgcaccagcgcgggttccagcaggtggcgtgaatgcagcacctggcgcgcttcggccacgctcgggctggagacgaaggtgccgcggttgggatggaccgtcagcacgccttcatgcgccagcttggcaaaggccagccgtaccttggtgcggctcacgccgaacacgccgcccagcttttcctcgaccagcttggtacccggcggcagccggtgctcccagatcgcggtcaggatgcggtcggcgattgcctcgaccgacgcgccgcgcgcgctgtccgtgtcggtctcattgataccgtcggtggcgggcaggtcggctttggtttgtggcatggcggttggcgttggcggcccggaaaaaaaagacagtcggtgtcgttattgtatggcggcttgccatcaagtgtataacagcggcgtcggaccggttgccgttcttacttcgcgccgagcttgtccagcgcctcgccggtcacgcggcagatgcgccagtcgggcagcacgtccgcacccatggcctcgtagaagtcgatcgacggctggttccagtccagcaccgaccattcgaagcggccacagccgcgctcgaccgccagcgccgcgaggtgcttgagcagcgccttgcccaggccgtggccgcgccaggccggatcgacatagaggtcttccaggtacaggccgggcctggccaggaaggttgagaaattgtggaagaagagggcaaagccgacggcttgccggccgccatcggtgtcgacttcgaccagcaccgcttcggcatgcggcgtggcgccgaacagtgcatcctggatcttctgcggcgtggcttcgacaatatgcgtcagcttttcgtattcggccagcgccaggatcaggttgaacagcgtctcgctgtcggcggcggtggcggggcggagcgtgaaggcgggcttggacatgctgggtcggctctccggcaaacaggaattcggaattatcgcctgtgcgtcacttgccgcgccagcttgcatgcaatcgggtcagtgcccgaagtccgccagcctgcgcacctggtcgacatacccgggcgccaggcaatccaccaccagccgctcgggcgtgctgcgcagccaggtcagctggcgcttgcacagctggcgcgtggcggcgatgccgcgctcgcgcatggtggcaaagtctgcgtcgccgtccaggtactcccatacctgccggtagccgacgcagcggatcgacggcaagcccggatgcaggtcgccgcgccggcgcagccgctcgacttcctcgataaagccgttggccagcatcgcgtcataacgctgagcgatgcgcgcgtgcagcgccaggcggtccgatggctccagcgcaatcacgcggaagcgctggtccgccgcgccggcaaaggtgcgcccctcggcctggcgcgccagcagtgccgacatcggctggccggacaggcggtggatctccagcgcgcgctggatgcgctgcgcgtcattgggcgcgagccgcgccgcggtgaccgggtcgacctcggccagcatcgcatgcagcgccggccagccgcgctcggcggcaagctggtccagctccgcgcgcagcgcggcatcggcctggggcaggtcattgagcccctgcgtcagtgccttgtagtagagcatggtgccgccgacgatcagcggcacatggccgcgcgcgcggatctgtgcgatcagccgttcggcatcggtgacgaactgcgccgcggagtagctgtcggccgggtcgatgatgtcgatcaggtggtgcggcgcggctgcaagttcttcgcgcgtgggcttggcggtgccgatatccatctcgcggtacaccagcgccgaatccaggctgatgatctccaccggcgcgtcggccgccagcgccagcgcggccgcggtcttgcccgaggcggtggggccgagcaggcagaccacgggcggatgcgtggcggaatcgtggggtacggcggacatcgaaagccttggatgaatcgtggggcgagcggcttattgcccgcgcaggaacagccggtccagctcggtcacggtcagttgcacccaggtcgggcggccgtggttgcactggtcggcgcgctcggtctgctccatctggcgcaagagcgcattcatttcctcgagcgtgagcttgcggttggcgcgcaccgcgctgtggcaggcgagggtggccagcagttcgttgcggcgctcggccagcacgcgcgagccgccgtaggcatgcaggtcgcgcaacacatcgcgcgccagcgcttcggcatcggcctgctgcagcagcgccggcaccgctcgcaccgcgagagtggtgggcgacaccggggcgatatcgaagcccagcagcgtcagtgtctcctggtgttcttcggccacgccgatctcgaccgggctgccgggcagcgtgaccgggatcagcagcggctgcaccgcgaggtcgcgcgcgtccaggccggccttgatctgctcatacaggatgcgttcgtgcgcggcatgcatatccaccagcaccagcccgcgcgcgttctgcgccagcacatagatgccatgcagctgggcgatggcgtagccgagcgggtggtcgtcgggggcgtcggcaggatcggcaaagccggcgcgcgcggccggcggcaggcggtccagcaggccgggcgggtcgtcggcgcgtgccgcctgcgcgtcggccagccaggccggcgcttgcgccggggtgccgggcatggcgccatacggccgcgctgccggtgcggcggcatcgcgcaccatgcccaggtaggcctggcgtggctgggcgatgccgagttcggtctggcgtgccgcggaataattgatccactggccgccaccaccactgccgccgccaaagcccggccgtgcgccgcccgccggtgtcgcgccgccagacggcagggtgatctcgccgtcggcatcggtatgcaggctgtcgccgttcccgccggcctgccgcgccaggcaacgctgcaccgcgtggtagacgaactggtgcacggcgcgcgattcacggaagcgcacttcgatcttcgacgggtgcacgttgacgtcgaccatctccggcggcaggtccaggcacagcacataggacgggaagcggtcgccgtgcagcacgtcctggtaggcgctgcgcaccgcgtgattgagcagcttgtcgcgcacgaagcggccgttgacaaagaagtactgctggtccggccgcccgcgcgaggcggtgggcagcccggcaaagccatacaggtgcagcgtgtcggcctcttcgtccagtggcaggcgggcgcgggcaaagtcattgcccagcacctgcgcggtacgggtggcgacgtcgccggcattccagtgctccagcggcttgccgttgtggtggaccgagatggtcacgtcgggccgcgccagcgccacgcgccgtaccatctccaggcagtgccccagctcggtttgctccgatttgaggaactttcggcgcgctggcgtgttgaagtagaggtgctgcacgtcgacggtggtgccgaccccgcccgaggcaggctgcaccgtgccggtatcggcgctgacctgggtggcatgggcatcggccgcggtgcggctggtcagggccagctgggacaccgaggcgatcgaggccagggcctcgccgcggaagcccagcgtcagcactgattccagttcgtcgagcaacgcaatcttgctggtggcgtggcgcatcagcgcgaccggcaactctgccgcagggatgccgcagccgttgtccgtgatgacgatgcgccgcacgccgccttcttccagccggatgccgagctgcgtggcgccggcgtcgagcgcgttttccagcaactccttgaccaccgaggccggtcgttccaccacttcgccggcggcgatctggctgatgagctggtccggcagcggccggatcgggcgcggctgctgggtggtgcgcagggcggtgctggaggcggaggcaggcatccggcgattatacgtggacgcccgcacggagtcggacgcgcaaaggcgccgcaggtgacggattggcgcggcggctcttgtatgattcaggccaaggcggcccaggccgcatcggacagaacgcagtcaaccaaaccatcaacggggaacgacttggatctcgctttgcagctcatcgacatgctggtgcatgtcgacaaatacctcggcacggtcatcgaccagtacggccactgggtctatgccatcctgttcctgatcgtctttgccgaaaccggtctggtggtcctgccgttcctgccgggcgactcgctgctgtttatcgcgggcgccttctgcgcaaccggcgccatgaacgagtgggcactgatcggcctgctgctggtggcggcgatttccggcaataccgtcaactacctggtgggcagctggatcgggcccaaggtgttcgaccatcagtggcgcttcctggaccaggatgcgctgcgccgcacccatgacttctatgagcggcacggcggcaagacgctggtgatggcgcgcttcgtgccgatcgtgcgcaccttcgccccgttcgtggcgggcgtgtcgcagatgacctttgcgcgcttccagatgttcaacgtggtcggcgccgtggcctgggtggtcggcctggtctttgccggctacttcttcggcaacctgccgttcatccgccagtacctgaacctgatcgtgctggccggcattggcgcggccgtggtgccgctggttctgggcgggctgtggaagctggtgcgcggcaaccgccgccggcccacgcgcgtggagcgctgagcaagtgaggggccgcgcagccttcgcgcccttttttcactatgaagcgggttcttagttgaggctgcggctcatcatccgcagcgccggcatgcgctcgcggatctggccgatatcggccgcatcgggccgggcgagcacataggcttccaggtcggccagcgcagggcggaagcactccaggttggcgtacgccagcccccggtcgcgcacttcctcgatcgaacccggcagcaggatcaccagccggttctgcaccgccagcagcctctgccagcgcgactcctgcaggtagatcgccttcaggttgcgcagcatgcgtgcgacgatctcgcggtggctggccgcgcgcaggaacaggcccagcggcacctggctggcatcgctgatgccttcgcgctccaggtacgggtccagcatttcctgcagccgttccttcgacagggtctcgccggtgagcgggtccaggatcacctcgccggcaggaatcgtcatgcgcagcaggaaatggttggggaacgacacgcccttgagcggcaggccgatctgctggcccagctccatgaacagcaccgcaagcgagatcgggatgccgcgccgctggcgcagcaccacgttcaggtaggagttgtcggggtcgtagtagtcgttcgcgttcgggccgaaacccaggtcgcgatagaagaaatggttcagcaggcgcagccgctggatcgcgggggtgccttcggcgatccggcgcttcaggcgcagcgccagcacgtccagcgccgcaagctcggactgcaggtccaggtcggggtaggcgtcctgcgcgatggacagcgcggtttcggtcagcgggatgccgttttcgtcagccacgaggctggcgaaataatccaggactttggtggatgtcatgtcggtttcccggtgcagccgccggcaccgcgcgcagcgtgggtcaccattgccggctcgttaggtggcccatgcgttggcagattcgctggcccatcagccggcgcggcgcctgaaggcagagtagcgcagtcccatgagccacagtgtaccgaagtagaccaccgctgcaagtaccaggcacgaagccagcagcgcgatgcgcagcagcggcgtcgcgcccagcccgatccagtcgaagttgcgcgcgaaccagagcagcatgccggacagcagcagcaccgaggcgcacagctgcgccaggaacagccaccagcccggcgccggccggtacaggccgcgccggcgcaggccgaagaacagcagcagcgcgttgatggtggcgccggcgctgatcgacagcgccagcccggcatggccgatccacggcacgaacgcatagttgcaggcctgcgtgatcacaagcaccagcagtgcgatcttcaccggcgtgcggatatcctggcgcgcatagaagccgggcgccaggatcttgatcgaaatcagccccatcaggccgacgccgtacgagaccagcgcctggcgcgtcatctcgaccgcgtgggcgtcgaacttgccatagttgaacagcacggcggtcagcggcgcgccgaacacgaacagccccaccgcgcagggcaccgccagcaggaaggtcaggcgcaggccccagtcgagcaggctcgagtactcggcatggtcgcccgaggcgttggccttggacaggctcggcagcaggatggtccccagcgccacgcccagcagcgcggtcgggaattccatcagccggtcggcataggtcaggtaagagacgctgcccgcggccagccgcgaggcgatattggtattgatgatctggctgatctgcgccaccgacacggccagcagcgccggccccatctgccgcaggatgcggcgcacgccgggatcggaccacgccgcgcgcaggttgaagctcagccgcggcatcacgcccaggcgccgcagcgccggcacctggatcgccagctgcagcacgccgccgaccagcacgccccacgcctgcgcgtagatcggctggtccatgtgcgggccgacgaacagggccgcgatgatcaggcacaggttgagcagcaccggcgtgaaggccggcaccgcgaacttgcgccaggtattgaggatgccggacgccagcgccaccagcgagatcaggccgatatacgggaacatcacccgcgtcatgaacacggccgcggtataggtctcgctttgcccgcggaagccggtggcgaccgcggtcatcaccagcggtgccccgatcacgccaagcagggacacgcccatcagcacccaggtcatgaccgtggcgacggcgtcgatcagtgtcttggtcggctcgtcgccgcgcttggtgtggtattcgcccaggatcggcacgaaggcctgcgagaacgcgccttcgccgaaaatgcggcgcagcaggttgggaatgcggaaggccacgttgaacgcgtcggtcatctccgacgcgccgaaggcgcgggcgatcaggatttcgcgcacgaggccggtgatgcgcgagagcatcgtaaggctgctgatggtggcgagcgctttgagcaggttcaaggtgcgggtcggtgcgggacggtggatcggtgcgggcgcaccgcatgccggggacgccactgagacgcggtccgggcgataaagttgccggcgcgccacgtgccccggcacaatgtggcgcttattatacggaccggcccggcgcccgcccgggcctgagctggcaaagtgtccgccgtgttgctttgtgcgccggcatctgtgtataattgccgattcacaaggacagttgcgttccggattcgtgtgtcagtgcatcccgggtcgctcgatatgacttaattgttgtgtcccccgcggcacgcatctgaattcaggatatttttacatggcaaattccgcacaagctcgcaagcgcgcccgccaggccgttgcccagaacgctcacaactccagcctgcgttcgcgtctgcgcaccgccgtcaaggccgtccgcaaggccatcgacgctggcgacaaggccgctgccgccgagatcttcaagaactcgcaagccgtgatcgacagcattgccgacaagaagatcgtgcacaagaacaaggctgcacgtcacaagtcgcgcctgtcggccgccatcaagtcgatggctgcctgatcgctgcccgggccgccccggcggtccagcagaggagggtgcccaggcatccgccaataaaaaagctcgtcatccgacgagcttttttgctttccggtgccaggccggcacgcttattccagcgaacaggcttcaaccagctgcaggttgttgtcgcgcgcaaagttaagcacgaaatccagcgccttgggttcaatgtcgcgcagccgcacgtccaccaccacgcatttgacattgccggcgaagatcggccgcacgtagggggagtaggtcaggcgcgggtcgccgctgtcgccctcggggcggaactgcgccatcacgccgcacagccgttcggcccagtcgctcgggcggaaggtcttgccttccttggtaatgccttggataaagaattcgcgaacgttggggttcatgaggctggacactgcgggtgaggcggacgactcgacggtaaacccgctggacgggcgcccgtttgacgcggccggggcgcgtttggttcgcgctggttccagccggaaggcggggcgtcggtgtcttgcgggggcacttttgatgccggcggcgggcagcggcatgggtatgccgggccccgcgtgaatcagcgggtattatatcttatataagagttgcgcataagggcgaaatcctgtcgggaacctgtcagcgggcccgggcaagtgcagggcgcaagtccgtgccgggttgtcccggactcgccaaagcagaaataatcccttatgattcttgcagttaaattgcgtatgcgacgcgaaaggcggctccgcggcgcgcttgagtcatgaacacttcgtgacggcgcgtccccaccgagccgccttctttgttttatgagctcaaccccgatcaagcattacctccagttcagcgacttcactcccgacgagtatgagtacctgctggatcgcgcgcggatcctgaaggccaagttcaagaactacgagacctggcacccgctgcacgaccgcacgctggccatgatcttcgagaagaattccacgcgtacgcgcctgtcgttcgaagccggcatccaccagctgggcggccacgcggtgttcctgaacacgcgcgactcgcagctgggccgcggcgagccgatcgaggatgcggcgcaggtgatctcgcgcatggtcgacatcatcatgatccgcaccttcggccaggacatcatcgagcgctttgccgcgcattcgcgcgtgccggtgatcaacggcctgaccaacgaataccacccgtgccaggtgctggccgacgtcttcacctacatcgagcagcgcggcagtatccgcggcaagaccgtggcgtggatcggcgatgccaacaacatggcctacacctggatccaggccgccgagcggctcggcttcaccttccatttctcggcgccgccgggctaccagcttgatccggcgatggtgccggcgtcggcagccggcctggtcaaggtcttcgacgatccgctaacggcctgccagggcgccagcctggtcaccaccgatgtctggaccagcatgggcttcgaggccgagaacgacgcccgcaagcgcgccttcaaggactggatggtcacgaccccgatgatggaccgcgccgcgcccgacgcgctcttcatgcactgcctgccggcgcaccgcggcgaggaagtcgaggccgccgtgatcgacggtcccaagagcgtggtctgggaagaggccgagaaccgcctgcacgtgcagaaggcgctgatggaatacctgctctgcggccgctactgaaccagcgcggcgcggggtgaacagggaggggccgcgatggcccctctttttacgtctttcgtacagaaacccaaggagatggaagtgagccagttcgacaacgtgtcggtcgtcaagaaagccaacctgtactttgacggcaagtgcgtcagccacaccgtgctgttcccggacggcacccgcaagacgctgggcgtgatcttcccggccgcgctgaccttcaacaccggcgcgcccgagatcatggaaatcaacgccggcacctgccgcgtgcgcctggccggttcggaagactggcagacctatggcgcgggccagcagttcagcgtgccgggcaacagcagcttcgatatcgaggtgcaggaaacgctggactacgtctgccacttcgcgtgaccggcgcggcgggccggtcctggcccacctgctttacagcactaccggctccggttcgatgcgcacgccaaagcgcgcctgcaccgcatcggcgatgcggttggccagtgccagcagcatcgcgccggtgccgccgccgtggtgcaccagcaccagcgcctgcttgccgtagacgcccaccgggccatcggtcatgcccttgaagccgcagcggtcgatcagccagccggctgccagcttgtacgagccgtccggctgcgcataactgaccaggtccgggttggcctgcagcagcgcgtcgcgctgcgccgcgctgaccagcggattcttgaagaagctgcccgcattgcccagctgtgccgggtcgggcagcttgcgcgaacggatcgcgaccacggcgtcgcgaatcgtggccgcatcgggcgcagcccggccatcgagttcgcgcgccagctctccgtacgacagcaccggttgccacgccttgggcaggctcagcgtcaccgccgtgatgatgtagcggccggcgccggcgtgcttgaacaggctgtcgcggtagccgaagccgcaggcccgcaggtccagccacacgaatgcgccggtgtggcggtcataggcgcgcacgccttcgaagcgctcgcgcagctccaccccgtaggcgccgatattctggatcggcgccgcgcccgcggtgccggggatcagcgccaggttttccaggccgggcatgccgtcggcgatggtgcggttgaccagcgcgttccagttctcgccggcgccggcggtgaccagccaggcatcgccagtctcctccggctggtagccggggatttccatcagcagcaccagcgcgtccaggtcgccggtcagtaccacattgctgccgccgcccaggaccagcaggggcaggccgtcggcacgcgggtcggccagggccgcggtcaggtcggcttcgctgcgcacatgcaccgcaaagcgcgcgcgcgcgtcgaatccgaatgtattgtggcgacgcaggggatagaattcgtggaaatctgccatgcaagggaaaggtgacgcggccgccgctggagggcaagcgacccggaactgcgaggtaggctggattatacggaaggcgccgtgcgcggccggcttccgggcatacggatcacaaggagaatgcaatgccgtcgtttgatgtagtgtgcgaagcgaacatggttgaggtgaagaacgccgtcgagcaggccaacaaggaaatctcgacgcgcttcgatttcaagggctcggacgcccgggtcgagcacaaggaaaatgaactgactgcctttgccgacgatgatttcaagctgagccaggtcaaggatgtgctgatcaacaagatggccaagcgcaacgttgacgtgcgcttcctggactacggcaagatcgacaagatcagcggtgacaaggtcaagcaggtgatctcgatcaagaagggcgtgaccggcgacctgtccaagaagatcgtgcgcatcatcaaggacagcaagatcaaggtgcaggccagcatccagggcgatgcggtgcgcgtgtcgggcgccaagcgcgacgacctgcaaagcgtgatggcgatgctgcgcaaggacgtgtccgaggcgccgctggacttcaacaacttccgcgactgattcctgcctcccgcgccggtgctcctgccggcgccgcctggcgctgccgcactcagcgaggctgcggcagtccgccgattttcgcgccggccttgatgcctttctgcgcgaaccatcccctgttcatttccagcgcatagcggatcgccgccttcgggcaatgattgctctccgtgcgcggcgccatgtcctcgatattgacgatggtgccgtcatcggccaggaaggcgatcgacagcggcagctcggtgttgcgcatccagaagcagtggcccgccttctgctcgaacacgaacagcatgccggcgttgggggccatggtcgtgcggtacatcagcccctgctcgcgtgccgccggcgtggcggcaacctcggcctggattgcaaacatgcctgcggtgagcggcaccaccggcagcgcggcctgcgcgtgcgcgatcccggcgctcagcgcgagcaggccggcaatcgaggagcatcgtgacaacagcgtgttggacaggaaggacatggtgttcagtctgaaatggcgcgggcagcggcagccgcaagcatagcgcacgcgcagtgtaccgatgtgcggcgggccgtacgtcgcgcatcacgagctgtcgcggcaacaaaaaaggcaggcgcctggcggcagcctgccttctctttcctgcctcgcgagcgcacggggcaggaagggcgccagcgattactgggcagccggggccgaagcggcgggggcagccttcttcttgctgtgcttcttgctggtggtcttcttcttggtcgtggtcttcggggcttccttggtggccgcgggcgctgcagcgtcggcggcagcaggtgccgaagcctgggcgaaggcgccggtggcgaacaggccaacaaccagagcagcgatcagttttttcatgacgtattacctcgaaggatgagaacagtcggaaagtttgacgcgtgataggacgtgtccccgacaagaacgaggccgctgccgccagcgttgacccgcgacttgttagtttttgtaacgagaacgccgcttggtgtcgttcgcctgtctggtcttcgagacatgggatcgaggtgccggctcctggcgcatgcgcggtgctgccggtgccagtcccagttgcgccggcaacacctcgcagcaggccccgggcgcgaggccgagcgcgcgcaggtcgagcgggccgatcccgacgcgcaccagccgcaatgtgggaaagccgaccgcggcggtcatgcggcgcacctgccggttcttgccctcgcggatcttcagctccagccacgcggtcgggatcgccgcgcgaaagcgcaccggcggctggcgcggccacagccagtcgggcgcgtcgatggcgcgtaccctggcgggctgggtcacgaagtcgccgaggtctaccccggcgcgcagccgggccagcgcggcggcatcgggaatgccttcgacctgggccaggtaagtcttctccagcttgtggcgcgggtcggcgatgcgcgcctgcagcgcgccgtcgtcggtcagcagcagcaggccctcgctgtcggcatcgagccgcccggccgggtagacgccgggcacgctcacgcacgcggccagcgtcgggcgcgtcgggtgttccgagaactggctcatggtgccaaacggcttgttcagggcaatcagggtcatggggcgcaagtatgccgcagcggcgcgccgggccgggaaatcggcggatctggggtccggcccgattggcggatgatgaaaaattgctgcataatacgaaattagtcttgtgtcttatataagactgaaggcagcccaggatggcgccagggtgatgcaatgcagcacgggcgcgcagcaaggcccgctacaatgccacagcgccatctccccgaatctcgccgaccggccatgaaccggcggcagtcacaaccgttccgtactggagacgtcatgtaccaacatatcaaggttccggccggcgaaaagatcacggtcaaccaggacttttcgctgaatgtcccggacaatccgatcattccttacatcgaaggcgacggtacgggcctcgatatcaccccggtgatgatcaaggtggtcgacgcggctgtggccaaggcctatggcggcaagcgcaagatcgcctggatggagatctacgccggcgagaagtccaccaaggtctacggcccggacgtgtggctgccggacgaaaccctggaggtgctcaaggattacgtggtctcgatcaagggtccgctgaccacgccggtgggcggcggcatccgctcgctgaacgtggcactgcgccagcagctggacctgtacgtctgcctgcgcccggtgcgctacttcaagggcgtgccctcgccggtgcgtgagccggaaaagaccgacatggtgatcttccgcgagaactcggaagacatctacgccggcatcgaatgggcggcggaaagcgagcaggcgaagaagctcatcaagttcctgcaggacgagatgggcgtgaagaagatccgcttcccggcgacctcgggcatcggcatcaaaccggtctcgcgcgagggcaccgagcgtctggtgcgcaaggcgatccagtacgccatcgacaacgacaagccgtcggtgacgctggtgcacaagggcaacatcatgaagttcaccgaaggtggcttccgtgactggggctacgagctggcgcaaaaggaattcggcgccgagctggtcgacggcggcccgtggtgcaagttcaagaacccgaagaccggcaaggacatcgtgatcaaggacgccattgccgacgccttcctgcagcagatcctgctgcgtccggccgaatactcggtgatcgccacgctgaacctgaacggcgactatgtctccgacgcgctggccgcacaggtcggcggcatcggcatcgccccgggcgccaatatgtctgactcggttgccatgttcgaggccacccacggcaccgcgccgaagtacgccggcaaggactacgtcaacccgggctcggaaatcctgtcggccgaaatgatgctgcgtcacatgggctggaccgaagccgcggacctgatcatctcgtcgatggagcagtcgatcctgtccaagaaggtgacgtatgacttcgcccgcctgctggaaggcgcgacgcaggtgtcgtgctcgggctttggccaggtgatgatcgacaatatgtaagcacggactcccgctgcggcgggcgacctgccaaggaaaaccccggtgccgtctggtcggcgccggggttttttcttgccccgggcgccactgttgcctagaacgtcaggggttggactgacgggcctggcggcccgaggagacaggcatggacgatcccttccgccgcaccgcgttcggtgcggccctcttctacaaggacccgctggcggccctggactggctggagcgcgccttcggctttgagcgggtcatggtgatccgcgaccagcaggaccagctggtgcattctgaaatgcgtttcggcgacagctacctgatggtgggcagcgagtgggcggactttaccgccagcccggcctcgatcgggggcaagaatacccagaccctgcacgtgcacctgcgggaagggctggaccagcattgcgagcgcgcccgcgccgccggcgccgtgatcctgcgcgagccgcaggacgagttctacggcgaccggacctacacggcccgggacgcggagggccatgtctggaccttcggccagactgtgcgcaaggtcaccagggaagaagccgagcaggccagcgggctcaagatcgacggctgggcctgatggcccgaccccggggcacaagcagaaagcccggcgcgaggccgggctttcggtcggatgtggtgcgtgcagctgatccgcgccggcacccgccgcaccgccgtggcggcaacgcggggcgctggcatcgatcccgtcccgggggagctccccccacaccctggttgaccgctccgcggctctgcggccgggatgcggtcgcggcgcgctttagctggcgtcctggatattggtggcttgcttgcccttggggccctggaccacctcgaacgagacgcgttgaccttccttcagcgtcttgaagccggacatctggatagccgaaaagtgcgcaaacagttcttcttcgccctcgtccggcttgatgaacccgaagcccttggcgtcattgaaccatttgacgataccgcttgccatatactcccccacgaaatagcagatttcaaagcggggaagccttgccggccagacggcacggactgcggcgccatgacctgccgcgtcctgaggcgcggccggcgatgacgcgcggcgaggtgcaatcgcgtggcggacagtctcgatgctgactcgccgccgcggcggccgtggcctccctgctcacggatcacctgtctcggctgttgctttggctcgttggccgtcggcaggtgtgcgaacgattcttctggcaaagcaggatactgtcaagttggcggattccccactgccagcagggtgtggcgggaatgggacggcacctggtggtaccttggcggcatgcgccagggctgccgtgcttgctgtcccgcccgcgccggccacgtgccttgcaatgcctcccgcgtgaaatcccgcgtccttccaccaccggaaacaggtggcccggctcttgaatccggcgccttttccccaaattgcagagttgcgagtaagggttagaataaagccatggctacacggcttgcgaatgtcccacaacgcgaagcgggcaccatcctggagcggaaagagcaggcgcttaaaccgcccgccatgttcaaggtggtgctgcttaatgacgactacactccgatggagtttgtagtgatgatcctgcagcagtatttcagcagggaccgggaaacggcgacgcagatcatgctcaccgtgcaccgggaaggaaagggcgtctgcggtatctacaccagggatattgcagcgaccaaggtcgagctggtgtcaacgcacgcgcggcaggcggggcatcccctgcagtgcgtgatggaggaagcatgattgcgcaagaattggaagtgagcctgcatatggcgtttgtcgaagccaggcaggcacgccacgagttcattaccgtggagcacctgctgctggcattgctcgacaatcccacggcagcggaagtcttgcgcgcctgcgcggccaatatagaagacctgcgcaccagccttaagaacttcatcgcggataacacgccggtagtgccgggtaccgacgaggtcgatacccagcccacgctcggtttccagcgcgtgatccagcgcgcgatcatgcacgtccagtccacttccaacggcaagaaggaagtgacgggtgccaacgtgctggtcgcgattttcggcgagaaggattcgcacgcggtctattacctgcagcagcagggcgtgacgcggctggacgtggtcaatttcatcagccacggcatccgcaaggaccagtccgagcccgccaagcatggcgatgccgccggcgaaggcgagggcggcgacggcaaggaaagcccgctcgagcaatacacccagaacctgaacacgctggccaaggccggcaagatcgacccgctgatcggccgcgagagcgaagtcgagcgcgtggtccaggtgctgtgccgccggcgcaagaacaacccgctgctggtgggcgaggccggcgtcggcaagaccgcgatcgccgagggcctggcgtggcgcatcaccaagaacgaggtgccggacatcctggaaaaggcgaccgtctactcgctcgacatgggcgcgctgctggccggcaccaagtaccgcggcgacttcgagcagcgcctgaagggcgtgctcaagtcgctcaaggacaatccgaacgcgatcctgttcatcgatgagatccacacgctgatcggcgcgggcgctgcctcgggcgggacgctggacgccagcaacctgctcaagccggcgctgtcgtcgggccagctcaagtgcatcggcgcgaccacgttcacggaatatcgcggcatcttcgagaaggacgcggcgctgtcgcggcgcttccagaagatcgacgtggtcgagccttcggtcgaccagaccgtgcagatcctgcgcggcctgaagtcgcgcttcgaggagcaccacggcgtcaagtacgcggcctcggcgctgaccgcggcagcggagctgtcggcccgcttcatcaccgaccgccacctgcccgacaaggcgatcgacgtgatcgacgaagccggcgcggcgcagcgcatcctgccgaagtccaagcagaagaagaccatcggcaagggcgagatcgaggacatcgtctcgcgcatcgcacgcatcccgccgcagagcgtgaaccaggacgaccgcagcaagctgcagacgctggaccgcgacctgaagtcggtggtgttcggccaggacccggcgatcgaggcactggcctcggcgatcaagatgtcgcgcgccggcctgggcaagaccgacaagccgatcggctcgttcctgttctccggccccaccggcgtgggcaagaccgaagtcgccaagcagctcgccttcatcatgggcatcgagctgctgcgcttcgacatgtccgagtacatggaacgccacgcggtgagccgcctgatcggcgcgccgccgggatacgtcggcttcgaccagggtggcctgctgaccgaggccgtcaccaagaagccgcactgcgtgctgctgctggacgaaatcgagaaggcgcatccggatatcttcaatatcctgctgcaggtgatggaccatggttcgctgaccgacaacaacggccggcgcgccgacttccgcaacgtgatcatcatcatgaccaccaacgcgggagcggagaccatgaaccgcgccaccatcggcttcaccagctcgcgcgagcagggcgacgagatggctgacatcaagcgcatgttcacgccggagttccgcaaccggctggatgccatgatcagcttccgctcgctggacgaggaaatcatcctgcgcgtggtcgacaagttcctgatgcagctggaagagcagctgcacgagaagaaggtggaagccagctttaccgagaagctgcgcaagttcctggcgcacaaggggttcgatccgctgatgggcgcgcgcccgatgcagcgcctgatccaggacatgatccgcaaggccctggccgacgaactgctgttcggcaggctggtttcgggcggcaaggtggtggtggacctggacgagcaggaccagatcaagctcgatttctccgagatcgagccggaaccgcccgaggcgcccgaggaacagcgcgcagaagcctgagcggttatcggccgcgttgccagcaacgtggccggtcatcgggcaaaatacgggggcggcagtcatgccgccccttttctttttgtcccggcggccgccggccatgcccgtcggggcacgggtttgcggccgcagctggccgcgcaaccggccaggaatccagcctgaaaaccctgatgtcctctgccgaacgcacgcggcgccgccgcctgctgctcaagatcctgccgctgggtgccatgcccgtcccgatgctccacgtcgctgcagccgccggcgccgaaccgctggcgggcaaccgcccgatcgcgctggtgctgccgttcccgcctggcgggagcgtcgacatcgtggcccggcagctgcagcctgggctgaaggcgacgctggggcaggccgcggtggtcgacaacaagccgggtgccggcggcctgatcgcatcgagcaccgtggcgcgcgcgaagccggacggcaccaccctgttgatggccttcgacacccacgccatcaaccctttcgcctacaagcagctgccctacgacaccttccgcgatttctcgccaatctcgcagctggtgcgctttccgctggtgattgccgccaatcccgcgctgcccgtggccaatgtgcgcgagctggtggagctggccaaggccaggcccgacggcgtgcgctatgcctcgtccggcatcggcagcctgaaccagctggcggcagaggcgctggcgaccgaagccggcgtacgcatgctgcatgtgccctacaagggcggcggcccggccgtgcaggcggtgctgtccaacgaggtcgatattttcttcagcagctacgccgccgtgcaggcgcacgtggccgcacgcaccatcaaggtgctgggcgtgaccggcaccagccggctgcgccagctgccgcaggtgccgacggtggcagagcaggggctcaagggcttcgaggcctactcctggatcggcgtgttcggcccggccggcctgccggcatccacggtcacgcgcatccacgacgcgctggtcgaatcgctgcgccagccgcgcgtgctcgatgcgctggccgcgcagggcttcgagatcgtgggcggcagcccggccgacctcggcaacctggtgcgccgcgagcatgacaaatggcaggccgtggcgcgcaaggccaatatccagttcgaatgacgatgtccggcgcgggtgcgccgtgaaaccgagaggatgccgatggcaacgcaagcggaaatgttcgaccacgcggtggtggtgtgcccagacctcgatgccggggcccgggcatggcgccggctcggctttacgctgacgccgcgcggctaccacacgctcggctcgcagaaccactgcatcatgctgcggcgggactaccttgagttgctgcacgtgaccgcgcccagcccaagccgccagtactactgggatgcgcaggcgcacggcggcggctgcgcggcgatgtcgtgcaagagcgccgatgcctttgccaccgcggcacggctgcgtgcggcgggctggcacacctcggacccgatcgagttctcgcgtccggtgcggctggatgacggcagcgagcacccggccaccttccgcgtgaccgcgcttgacgatgcgccgggcgcgcgctacttcgtctgcgagcaccgtacgcccgaactgctgtggcggcccgaatggacccgccatgccaacggcgcgcacagcatcgccaccatgttcctggtggtggcgcccgcgctggtggacgccgccgcgcacgcctacgcggagctgaccggcggcgagctgacgcagctgagcgaacatgtctgcagcctggcgctggacgatgccacgctggtggtcagcacgccgcaggcgctggcttcggccaccggcaccgcgcatatccggcgcgaggggccgggctacgctgcaatccgcctgcgcaccgatgacctggcggcggcacgtgccggctggcgcgaacagggtgtgccgacccacgacctgggcccgcgcgagaccctggtgctggcggatgccgccagcggcgtggcgctgctgttcgagcagcagggctgaaaagcaaactggcgccccgcggggcgccagtgtcttgtgcggccagaggctgcgtcaggcgctggccttggcgtggtgcacgccggtcgagccaaagccgcccgcgccgcgttcgctgtcttcgctgaattctgccaccgtcgaaaacaccggccgcagcaccggcacgaacatcatctgcgcgatgcgctcgcccggctggatcacgatcggctcggtgccgggcgcgttgcggttccacacgctgaccatgatctggccctggtagtcggcatcgatcacgccgatcgaattgcccagcaccaggcccttcttgtggcccaggcccgagcgcggcacgatggtcgcggccatgtacgggttgcccatgtgcacggcgatgccggccggcaccagttgcgcgggcgtgcccggcgcgatcgataccggggcgtcgacgcaggcatggaggtcgatggcggcggccatttcgctctggtaggcgggcaggccccattcattcaggcgcgcatcgagcaccttgatttcgacggttgggttcagtggctgggtcatgggaatcctgggggaaatcggttcaacggaataggtggcagccgcgcatgataccggacgcgcgcccgccatcagggccgtgtgcgcccgggcaggcgctggccgatcgccgccaccagctggcgcgccagtgacagcttgtcggcgcgcggcagccgcgtcatgccggcggcgtcgaacagcacgatttcgttgtcgtccaggccgaaggtatggtggccgatattgccgaccagcagcggtacgcccttgcgctggcgcttctgctcgccgtaccgctccaggttctcgctctcggcggcaaagccgacgcagtagggtgcgtcggcccgcgccgcgaccgtggccaggatgtcggggttctgcacgaactgcagcgtgggggtgtcggtatcgttggccttcttcagcttctgctgcgcgacttcagccgggcgccagtctgccaccgcggccacggcgacaaagacatccacgccgtgcagctgcgcgatcaccgcgtcatgcatctgctgcgcgctgcgcacgtcggtgcggagcacgccgcgcggggtgggcaggccggtggggccggccaccagcagcacctcggcgccggcctcgcgcgccgcgcgcgcgatcgagaagcccatcttgccggacgacaggttggtgatgccgcgcaccgggtcgatcgcctcgaaggtcgggccggcggtgatcagcacgcgcttgccttgcagcggcttgggctggaagaaggcgatgatgtcgtcgagcagttcttcgggctccagcatgcggccgtcgccgacctcgccgcaggcctggtcgccgctgccggggcccaggatcatcacgccgtcggcgcgcagttgcgcggcgttgcgctgggtggcgggggcggcccacatctggcggttcatcgccggtgccaccagcagcgggcagtcgcgcgcgatgcacagggtgctgagcaggtcgtcgcacagcccgttggccaggcgcgccatgaaatcggtcgaggccggagcgatgacgatggcatcggcctcgcgcgacaggtcgatgtgcgccatgttgttgtcgatgcgggcatcccactgcgacaggaagaccggacggccggacagcgcctgcatcgtcaccggcgtgatgaagtgcgtcgccgcctcggtcatggccacctgcacggtggcgccggccttggtcagcaggcggaccagttcggccgacttgtagcaggcgatgccgccggtcaggccgagaacgatgtgcttgccgcgcaaatccatggtggggaacctggctggggagaaagggaaatgataccggggaagccggctgagggttggctccccactcccgcacggcgggagtggggccgggggtgagggcgggcggttctggtggcgtggtgccttgctgaaccgcccctcaccctggcctctccccgtgaggggagagcggaacacaatcagggcgctcagtggcgccgcaccctgcgcagctcgtccacgatcagcagcaccgcgccgaccgtgatcgcgcagtcggccacgttgaaggccggccagtggtagttgcgcacatagaaatccaggaaatcgaccacgtgcccgtagaccacgcggtcgatcacgttgccgaccgcgccgcccaggatcagcgacactgcgaagcagaacagccgctgtccggtgtggcgatacagcagccacacgatgaacgcgcccaccacgatgcccagcccggtgaagaaccagcgctgccagccgccggcatcggccaggaagctgaacgccgcgcccttgttgtagaccagcaccaggttgaagaagccggtcaccgggcgcgattcaccataggtgaaggtgcgcacgatgacgatcttgaagaactggtcgagcaccaccaccagcagcgcgaaggccatccacagcagcggggtggtgctggcggccttgttgttgcggcgtgccgggcgcgcggaacgggacgtggtcgatgccatcaggcatggctcctgtgttcaccggcgccgaacaggttgctgtcgcagcgcccgcagagggtcggatggtccgggttgtggccgacatcggcgcggtagtgccagcagcgctcgcacttggcatgggtcgacggggtcaccgtgaccagcaggtcgccggcctcgggcgcgtgcgttaccttggccgatgaggtcagcagcacgaagcgcaggtcgtcgcccaggctctgcagcgcgtccagcaccgggccgccggcctggatggtcagctcggcctgcagcgacgagccgatctcgccttccacgcgcaccgcttccagctgcttggtgacctcggcgcgcacttcgcgcagcgtgtgccacttctgcagcagatcgtcggcgccatcgtcgacttccggtatcgcgtagtaggtgctggtgaagatggtgtcggtgtgctcggtgccgtgggcgaagatctgccacgcttcctcggcggtgaacgacaggaacggcgccatccagtgcagcatcgcctgggtgatgtggtacagcgcgttctgcgccgcgcggcgggccttggagtccggcgcggtggtgtacaggcggtccttcagcacatcgaggtagaacccgcccaggtcctcggagcagaaggtctgcagcttggacaccaccgggtggaattcatacgcctcatagtgcgacagcacttccttttgcagctgcgcggtcagtgccacggcgtagcggtcgatctccagccattccgacgccggcagcgcgtgcctggcgtggtcgtagtcggacaggttggacagcaggaagcgcagcgtgttgcggatgcggcggtagccttccaccacgcgcttgaggatctcgtccgagatcgacagctcgccggagtagtcggtcgaggctacccacaggcggatgatctcggcgcccatcttgttcgagatgtcctgcggcgacacggtgttgccgatcgacttggacatcttgcggccttcgccgtcgacggtgaagccgtgcgtcagcagcgccttgtagggcggcttgccgtacagcatcgacgcggtcagcagcgacgagtggaaccagccgcggtgctggtccgagccttccaggtacaggtcggcgaggcggccatcggcttcatcggcggacggatcgtacaggtcgtcgcggtgcgagccgcggatcacggaccagtgcgtggtgccggagtcgaaccacacgtccagcgtgtcgcggttcttctcgtactggctggcctcgtcgcccagcagctcggccgggtccagcgtctgccaggcctcgatgccatgctgctcgacgcgcctggccacttcttccagcaactgcggcgtgcgcgggtgcagcgctccggtttccttgtgcaggaagaaggccatcggcacgccccactggcgctggcgcgacagcgtccagtccggccggttggcgatcatgttgtgcaggcgctgcttgccccaggccgggaagaactcggtggcgtcgatgccggccagcgcggtctcgcgcagggtggggccggtcttgccgttctcgtcggccgggtccacgtccatgcccgcgaaccactgcgaggtggcacggtagatgatcggcgtcttgtggcgccagcagtgcatgtagctgtgggtgtacttgtgcgagttgaacaggttgcccgaggcctgcagcacctcgacgatcttcgggttggcgtcccagatcgacagcccgccaaagagcggcagcgtgccggcatagacgccgttgcccatcaccgggctgatgatgtcggaatcggccatgccgtgcgccttgcacgactggaagtcttccacgccgtaggccggcgccgagtgcacgatgcccgaaccggtgtcggtggtgacatagtcgcccaggtagaccggcgacaggcggtcatagcccgcgtccatcttggccagcgggtggtggaagcggatttccgacaatgccgcgccggtggtggtggccacgaccttgccttccaggccgtagaccttgagctgctcctcgacgcgctcggtggccaggatcaggtagccgcgcggggtctcgaccagcgcgtattccacttccgggtgcacgttcagcgcctggttgctcgggatggtccatggcgtggtggtccagatcacgatccagccgggcttgccgtcgagctgctcgaagggcaccttgaaggcgtgtgccagcttgtcggcttgcgcgaacgggaagcccacgtcgatcgacaggtcgaccttgtccttgtattcgacctcggcctcggccagcgccgagccgcagtcgaaacaccagttcaccggcttcaggccgcggaacacatagcccttctccatgatcttgccgagtgcgcgcagttcatccgcctcgttgctgtagttcatggtcaggtaggggtggtcccagtcgcccagcacgcccaggcgttcgaaatccatcatctggcgcttgatctgctcggtggcgtaggcgcgcgccttggcctggacctcctgcaccggcaggcccttgccgaatttcttctcgatctggatctcgatcggcatgccgtggcagtcccagcccggcacgtagacggcgtccagcccggtcaggccgcgcgccttgatgatcatgtccttgagcaccttgttgacggcgtggccgatatggatgtcgccgttggcatacggcgggccgtcgtgcagcacgaacttcttcgcgcccttgcgggccgcgcggatcttcttgtagagctgcttgtcctgccactgcttgacccactgcggctcgcgcttgggcaggtcgccacgcatcgggaagggcgtgtcgagcaggttgaccggatatttgcttttctcgggcttggcgcgtttgtcgtcaggcatttcgattctcagggcaattcgggttggcgcgcgggcggcggcaggccggcgggcgcgcggaaagactggggcggcggcgtgcgtgccgggcccgcgccactggcgtgcgggcgggcgccggccgctacctaattcggtcggtggcggaggtggcgaagtcgcgcccgccgctgccttcggccgcgcccggggcggtcaggccgaagaaggcgcgcgcatcggcgctgtccttggcgatggcggcggtgagctcgtccaggttgtcgaagcgcgcttcgtcgcgcagcttcttcatgaattcaacccgcaccagcttgccgtacaggttctctttgaaatcgaacaggtggacttccagcagcacccggccggcgtcctcgatggtggggcgcacgccgatgctggccacgcccggcaggggctggtcggcgatgccgtgcacctgcaccacgaagatgccgctgactgccggccgcttgtgcgagatgcgcaggttcagcgtcgggaagcccaggtcgcggcccagcttgcggccgtggatcacgtggccactgatggcatagccgtggccgagcaggcgccgggcatgctccagatcgccgtcggccagcgcctggcgcacggcagagctggagatgcggatgccgccttcggacaccgatcccatctgctcgacatcgaagccgtagcggcgcccggcttcctgcaggtaggtaaagtcgccggcgcgcctggcgccgaagcggaagtcgtcgccgaccagcacccaacgcgcgtgcaggccgtgccacagcacgttctcaacgaacgcctgcggcgactgggcggcaaagtgggcgttgaagtgttccaccaccacccggtccacgccgttgcggcgcaggctttccagcttgtcgcgcagcagcgcgatgcgggtgggggccttgtccggggtgaagaactcgcgcggatgcggctcgaaggtcatcacgcacagcggcaggccgcgtgcgtcggcggctgcacgcgcacgcgcgagcagcgactggtggccgcgatgcacaccgtcgaaattgccgatggtgagcgcgcagggcgcccggctttcggcgttgggcaggccgcggaagactttcacggggacggcgggaaacgtttcaggtaaagcgagcattataaggcgaatgggtccgcttgccgctcccgccgcccgcggccggtgccgcgctgctgtttttgtgccgcaaccggccctcgcggcatggcgcaatgccgcaaaaggcggcatgatatggcccacttcggcttcacttcggcgctggcacctgctgcccccgacatccgcccattccaagccagccacacttgaaagcgctgcccaaccggttcttttcccggctcctgccccgagtcctgcctcaggcgaccgcccagctcgacgtcgagacgcgcgccaagctgatggccatcgtgcacaagaactcgcccacggcgatcgtggcctcggtgctgctgcccgcgctgaccacgctgggattctggaacgacgtgagccgcgcggccttgctcggctggtgcgcggtgatgctgctgctgacggtcggcggcctgtggttctatgtcggctaccagcgcgaccatgcctcgatgagccgctccgcgcacacgcgcaagtggtggaacaatatgcgcgcggttgccttcctgaccggcgtgacctggggcagttcggcgctgctgcatttgtatacgggctcggccgtgttctccagcgtgctgtacctgctgacccttggggtgctggcaggcggcgcggtgtcgcaggcgccggtgccgtcgaacctggtctatgccggcgtgccgatcctggtgcccaatatcctgatggcggaattcgccttccccggccatggcgtctatgtgcaggtgctgctggtgatctatggtctgatgctgtcgcgccatgccttgcacctgcaggtcacgctggtgcgcgccatccagctcgagggcgacagccgccgcctggccaagcagttccaggaggaaaaggagcgcgcgctgcatgccagcgaggagaagtcgcgcttcctggctgccgccagccacgacctgcgccagccggtgcatgcgctggtgatgctggtggaggcgctgcgcgcgcgcaaccagtcgtcggcgctgcatccgctggtggagcaggtggcggcgggcacccagaccatcgacctcctgttccgttcgctgctggacctgtccaagctggaagggcgcaaggtgttgccgacgctggagccatgcgagctgggcgcgctgattcgcgacgtgatgagccagtttgccgccgatgcgcgcgaaagcggcctgaccctgaccccgcgcgtgcccgacgagctctacgccatggccgagccggtgctgttgcgccgggccctgttcaacctggtgcagaacgcgctgcgctacacccagcgcggcggtgtgctggtgaccgcgcgccagcgccgcaagcatgtgcggctggaagtctgggataccggcgccggcgtgacacccgagcacctgcccgacatcttttcgccgtattaccaggtccataacccgcagcgcgacccgtcgcagggcctgggcctggggctggccatcttcaaggaatgcgtgcgcctgatgcgcggcacctatggcgtgcgctcggtgccgggcaagggttcggtgttctggttcgcgctggcgacggtgccggccgagaccgtggccagcgtgcgcgagatgcgcgcgatggcgcaggcggaagaggccaagcccgaccgcctgcagggcacggtgctggtggtcgacgacgacagccagatccgcaaggcctggatcgcgctgatggaggcctggggcatccgcgtggcctgcgccgcgcacggcgccgaggccgacaagctgtttgccaagggcctgcgcccggacatcatcttctgcgacctgcgcctgcccggcagcgagaacggactggatttgctcgagcgctggcagaacacgcagccgcaggcgcgcagcgcgctgctgaccggcgacctgaaatccgccgcgctggcggcggcggaagaggcgggatatttcgtgctgcccaagccggtggacccggcttcgctgcggctgctgctgcgccgctggctgcggccggcgtagggtaccggcctgcgttactggcgcaggcggaaccgctccatgcgcgacatcacctgcatgcgcgtgcgcacgcccaggcgctgcaggatggctgacacgtgctccttgacggtgttctcggtcagccccaggcggcgcgcgatcaccttgttcggcaggccttccagcaccagcgccagcaccgagccctggcgcggcgtcaggccgagctcggccggcgtgaccggaatgccgtgggcgggcccgaacgactgcgcgcggccgttcagggcctcatcggtggggaaggaggtgtcgcctgccagcaccttgcgcaccgcggcggtgaaggcattggcatcaaggtgcttgccgacgaagccgcaggccgacagcgcgcgggcgcggccgacgatctcgggggtggcctcggcggacatgaagatgaagcgtgcgccggggatgacggtcttgaacgactgcatggcatcgaagccggtgccatcgttcagccagatatcgagcagcacgatatcggggcgcagaccctgctgcaggcttgtcagggcttcgcgggcactgccggcggcatggactgccacatccggcatgacttcggcgaggaaagccgtagtgcctgacaaagccataggatgatcatcgaccaccaacaacgtcggtgcagcgttcgacatgcgaattcccgttcaaattcccgtttcgtccttgttgtcaccagctcttggcgagcactgtgtcatgcacagggttggcgcgtggacgtagcgcccactctagcagagggggcgaagcgtcacaatccatcaatcgggggtatacgggcatgccgtcacatgttagagacatcgcgccctgtccgattctcgtgaattaagcacgtaatgcgttggctttaccagagtttagcgccttgccttggtagaattgcgcgatgaaaaaaattgtcatcttgatttccggacgaggctccaatatggaagccatcgtccgtgcctgcgcgggtggcggctggcccgcccgggtggcggcagtactgtcgaaccggccggacgccgccgggctgcaattcgcgcagcagcatggcatcgaaaccggcgtggtcgaccatcgccagcaccctgaccgtgccgcttttgatgcggctttggccgaggccatcgacgcccacgcgcccgacctggtggtattggccggtttcatgcgtatactcacgcccggcttcgtcgaccgctatgcgggccggctgctgaatatccatccgtcgctgctgccatgcttcccgggcctgaacacccacaagcaggcgctcgacgccggcgtcaagctgcatggcgccaccgtgcactttgtcaccccagaactcgaccatggcccgatcgtgattcaggctgcacttgatgtgcggccggcggacacgcccgagagcctggccgcgcgcctgctcgaatgcgagcacgtgatctatccccgcgccgtgcaatggttcgtagaggaccgcctgcaacttcaggacggcgtagtcaacgttatcaacccggccgaatcgcaattgctgatggccatctccgccgataccccggcgggaggagtcaaggcatgagtcgcacccaggcaggaacccgatccccgcgcagcgaaggacatgcccccgcgcgcagcaagggcaagggcaagggcagccccatccgcaagtcgcccaatgccaacggtgccccggtccgctcgcatggcggcctccatgccacccatatccagcatatcgaccgcctgctgggcaaggtcatgctgtttgcgcgcccggccgatgccgtggtgagctattacttccgcgagaacagcaagcttggccaccgcgagcgcggcatcatcgccgaggccatctacgcggtgctgcgccggcgcgtcgaatttgcccagtttgccgaaagcggcacgggcgcgacctcgcgccggctggcgctgctgggcctggccgcgaccctgggccgcgacacgctgacgccgttcctgcatcccgaagaagccgagtggctggaccgtctgaccacgatcgagcgctccagcctggcgccgcgcgtgcgcgccaacctgcccgagtggctgtacgacgaactggtgcgcggccacggcgaggccttcgccgcagccctgggcgacgcgctgctgcgcccggcgccgctggacctgcgcgtcaacctggccaagaccagccgcgaggccgcgctggccgagctgcacgccgccggcctgggcgccgagccgacgccgatggcgccggccggcatccgcatggccggcaagccggcactgaaccagttgccgatcttcgtcaacggcctggtcgaggtgcaggacgagggcagccagctgctgtgcaacctggtcgcacccaggcgcggcgagatggtggtcgacttctgtgccggcgcgggcggcaagaccctggcgctgggcgcggcgatgcgctcgaccggccggctctatgccttcgacgtatcggaaaagcgcctggccaacctgaagccgcggctggcgcgcagcgggctgtccaacgtccatccggtgctgatcgactccgagcgcgacgccaagatcaagcgcctggccggcaaggccgaccgcgtgctggtcgacgcgccctgcagcggcctgggcacgctgcgccgcaaccccgacctgaaatggcggcaatcgccggagtcggtgctggaactgactgccaagcagagcgcgattctggattcggccgcgcggctggtgaagggcggcggccgcgtggtctacgcgacctgcagcgtgctggaagccgaaaacgagcagatcgtgcgcgacttcctggctgcgcaccccaacttccgcctggtgccggccgccgaagtgctggccgagcagaagatcgaagtgaccgggctgccggacaacggcatgtttgccctgtatccgcacctgcaccagaccgacggcttctttgccgcggtgctggaacgcaccagctgagcgccggtgcctgccgggccgcctgccgatcgcgcgggcggccgcgccaaccctgagtttcctcgatgaacggtgagaccctgtccgacctgggtggcctgaaagacctgaaggcctcccactccatgttcggcaagatgctggacgacctgatccgcgacgcaggcgggccgggcttcttctggcagctgctggtgctggccggctgcctgctggtggcctggccgctggcgcgcttcgtggtgcggcgccttgaagcgcgctaccaaggctcaagcttctccgtgcgctttgccgccgccagcctcgagcgcgccatgttccccctggccggatgggtgctggtgctgatcgcccgctttgcgctggagccgctgatcccgatcagcgtgctgcgcctggcgctggtgccgctgttcggcatcaccttcctgaattccaccttctatgtgctgcgccgggtgatgtcgggcagtggccagctgcatggcatgctgctgctggtggagaaggtgctgaccacgctggtgtgggccggcatggcgctgtacgtgctgggcgtgctggcggacgtggtggcgtggatgcagggcgtgcgctttgcgatcggcggcaagcagaagatcagcctggccgagaccctgatggcggtggtctggatcctgctgacggtgctggtggcgctgtggttcggttcctggctggaagagcggctgatgcgctcggccaacctcgacggcaacctgaaggtggtgctgacgcgcatctccaaggccttgctactgctggtgtcgctgctgctgagcctgtcgctggtggggatcgacctgaccgtgctgtcggtgttcggcggcgcgctgggcgtgggcctggggctgggtttgcagaagatcgccagcaactacatctccggcttcatcatcctgctggaccgctcggtcaagctgggcgaccagatcacggtggacaagtacaccggcatcgtgtcgcagatccgcacccgctatacggtggtgcgcaacggcgatggcgaaaccctggtgccgaacgagcagctggtggcgcagccggtgcagaaccattcgttctccaacaccaatgtgcgcgtggccacccgggtgcaggcagactacaacgccgatccggaaacggtgatcgcgctgctgaccgcatgcgtgcgcgacctgccgcgcgtgctgcccgacccggagcccgccgctttcctggtgctgtttgccgatagcggcatcgagtacgaggttgcggtcttcgtggccgatccgcagaacggcaagctgggggtgcagtcggcgatgaaccgcgcgatctggcgcacgctgcgcgagcatgggatttccatcccctatccgcagcgtgaactccgcgtgctgggcgaggcacccttgcccggcaacgatctgcccccatctaagacggtagcggatgcagcgaatgcggcgagtgccgcatagaccgcaagatgggcgcagcatgcgccacccacggaacgaaaactgtggcgctccgtccaaatccgggaaatagcgtatgcttgcgcgtcgcgcgatccggtagaatgccgggttgtcgcgggttgcagcttcaagttgcagcgcacgctcccacatcagacagccgccagattgcagcggctcgtaccttgtcccgccagcgcaggccatcccggcgccggcgcgagactcgtgtgcctgggagcccggtatgacttcgggtcccgtggcaggcgccagaaagctatcgcaatcacttggattcgcagccttttttctgcgcgttgcgtgcaccggccccgccgggctgcacgggaaagtccctgtttaaccgacggagaacagtttgttcgacactattcttgactgggccgccaacggccttgccaactggacctggtgggagatcgtcatctacacgctcgtgatgacgcatatcacgatcgccagtgtcaccattttcctgcaccgctgcatggcgcaccggtcgctggatctgcacccgatcgcccagcatttcttccgcttctggctctggctgaccacgggcatggtcacgcgcgagtggaccgccatccaccgcaagcaccacgccaagtgcgaaaccgaagaagatccgcacagcccgcagacccgcggcatccgcaaggtgctgctggagggagcggagctgtatcgtgccgaatccaagaacaaggaaaccatcgccaagtttggccatggctgccccaatgactggatcgagcgcaacgtgtactcgcgcttcggctggcagggtgtcggcctgatgctgatcatcgacctcgcgctgttcggcgtgatcggcatgaccgtttgggccgtgcagatgctgtggatcccgatccatgccgccggcatcatcaatggcctgggccactggtggggctatcgcaactacgattgcgaggacgcctcgaccaacgtgtcgccgtggggcctgatcattggtggcgaagagctgcacaacaaccaccacacgtacccgacctcggccaagttctcgatcaagtggtatgagttcgatgtgggctggggctatatccgcgcgatgcaggcagtcggcctggccaaggtcaagaagaccccgcccaaggcacgcctggtggaagcccgcccggttgaccacaacacgctggaagcgatcatcgccaaccgctatgacgtgatggcgcgctacgccaaggccgtcaagggcgcgttccgccaggaactggaaaagctcaaggaaggccgcgtggccgagtaccgcagcttcaagcccgccagcaagtggttccaccgcgaggaaaccaagctggccgcgccgcagcgcgaacagctggcaagtatcgttgaacagaacaaggcgctgcagaccttcgtcgaaatgcgccgtgaactggccgccatctggggccgttccaacctgacgcgcgagcagctgctgcagcagctgcaggcctggtgccatcgtgccgaggccagcggcatccaggcgctgcaagatttctcgctgcgcctgcgccgctacgcctgatacaatccggccgcgccgtatggtttgacaaagccccgcccatggcggggcttttgttttagataaactccccaatattctggccgggccgcatccttgctggcgaaggtctagaggagtaccggagatgaccccacaatcgatcaagaccgtcgagttcgaaaagccgaacctggcggatgccgaaaacgccactggcagcagctgcgtggcccatgcctgggccaaggtgccgccggtgctgacacccgacgagcgccagtccctgaagacgcgtattcgccgcctgctcaaggaacgcaatgcggtgctggtggcgcactattacgtcgacgccgacctgcaggacctggccgaggaaaccggcggctgtgtctccgactccctggaaatggcccgcttcggccgcgaccacgaggcccggaccctggtggtggcgggcgtgcgcttcatgggcgagaccgccaagatcctgagccccgagaagaccgtgctgatgccggacctggacgcgacctgctcgctcgacctgggttgcccggccgatgagttcgccgccttctgcgatgcgcacccggaccgcaccgtggtggtctacgccaacaccagcgccgccgtgaaggcgcgcgcggactggatggtgacctccagcatcggcctgaagatcgtcgagcacctgcatgcgcagggcaagaagatcctgtgggcgccggacaagcacctgggcagctatatccagaagcagaccggtgccgacatgctgctgtggcagggctcgtgcctggtgcacgacgagttcaagggcatcgagctggacctgctgcgccgcgaattccccaacgccaagatcctggtgcaccctgagtcgccggaaaacgtggtggcgcaggccgatgtggtcggctcgacctcgcagctgatcgaggccgcacagaagctggacgcgaccgagttcatcgtcgccaccgacaacggcatcctgcacaagatgcgcatggcggcgcccggcaagcacttcattgaagcgcccacggccggcaacagcgcgacctgcaagagctgcgcgcactgcccgtggatggccatgaacgcgctcaccaacctggccgaggtgctggaaaccggccgcaacgagatccatgtcgacccggtgatcgggcgccaggcggtgacctgcatcaaccgcatgctggacttcgccgccgcgcagaagcgcaatgtgcgtccgtcggcagacctggccaaggaacaggcgctgttcaaggggattggcccggcatgagcgtgaattcgattttcgacagctacggtccggcgctgcaggcagcgctgcaagccaatgtgcaggccgccattgacgaggatgtcggcagcggcgacctgaccggcctgctggtgcctgcggccaaggcggcacgcgcgcgcgtgatcgtgcgcgagtccgcagtgctgtgcggccagccgtggttcgatgcctgcatgcgcgcgctcgacccggcgctcgaggtgcactggctgcagcaggaaggtgcccgcatggcgcacgattcggtggtctgcgagatcaccggcccggcgcgctcgctgctgacggcggagcgcccgtcgctgaatttcctgcagctgctgtcgggcgtggccaccgccacgcgccgctatgccgacctgatcgccggcacccgcgcgcgcgtgctggatacgcgcaagacgctgccgggcctgcgcctggcgcagaagtacgcggtccgcatcggcggcggcgagaaccagcggctggcgctgtacgacggcatcctgatcaaggaaaaccatatcgccgcggctggcagcatcagcgcggccatgcaggcggcgctggcgctcgataccagggcgtcggtgcagatcgaggtggaaacgctggccgaactggaagaagcgcttgcggccggtgcgaagtcggtgctgatcgataacttcaccgtgccgatgatgcaggatgcggtcaggatcaatcggggcagggcgctgctggaggtgtcgggcggcgtcaatgccgatactatccgcacctttgccgaaaccggcgtggaccggatctcggttggtgcgctgaccaaggacgtgcgggcgacggactattcgctgcggatcatcggctgacgcttcgcgcgataccagaaaaacggggtggggccttgcggcgccaccccgttttgctttgcctggccagccgtcagcgcttccttgtggctggcggctgaatcaccgtcggcagcgccttgggcagggtatccggatagtcccggctgaagtgcaggccccggctttcgtggcgcgaataggcgctgtccacgatcagcgaggccacttcgaccaggttgcgcagctccagcaggtcgctggtgacgcggaagttggcgtagtactcagcgatttcctcgcgcagcaggccgatgcggtgctgggcgcgctccagccgcttgctggtgcgcacgatgccgacgtagttccacatcatgcggcgcagctcgtcccagttgtgcgacaccaccacttcctcgtcggcatcggagacgcggctttcatcccaggccggcagcgtgatgtcaggcagcccggccttgtccttggaagcgatgtcctcggccgcggcgcggccgatcaccatgcattcgagcagcgagttggaggccagccggttggcaccatgcaggccggtgcaggcggtttcgcccacggcgtacagattgccgatatcggtgcgtccggaggtgtcggtgaccacgccgccgcaggtgtagtgggcggccggcaccacgggaatcggctcgcgcgtgatgtcgatgccgagctccaggcagcgcgcgtggatggtcgggaagtgttctttcaggaaggattcgggctggtggctgatatccaggtagacgcagtccaggccgcgcttcttcatctcgaagtcgatcgcgcgcgccaccacgtcgcgcggcgccagttcggcgcgcgcatcgtgttcgggcatgaagcgggtgccatcgggcagcttgagcaggccgccttcgccgcgcaccgcttcggagatcaggaaggacttggcgtaggggtggtacaggcaggtcgggtggaactggatgaactccatgttcgaaacccggcagcccgcgcgccaggccatggcgatgccgtcgccggtggccgtatccgggttggtggtgtacaggtagaccttgccggcaccgcccgcggccagcacggtgtgcgtggcggtgagggtgcgcaccgcgccggtgctgtcgtccagtacgtacaggccgtagcagcggttgcccggcagccccagcttgcgcgaggtgatcaggtcgattgcgaagtggtcttccaggatggtgatgttcgggtgctgcatggcctgctgcagcagcgtgctgaccacggcatggccggtggcgtcggcggcgtggatgatgcgccggcggctgtggccgccttcgcgcgtcaggtggaagcccagttcggcctgttcgtcgcgcgtgaatggcacgccgcggtcgatcagccactggatggcctcgcgcccatgctccacgatgaagcgcgtggcctcttcgtcgcacaaccccgcaccggcgacgagcgtgtcctgcgtatgctcgtcatggctgtcgccggaatccagcacggcggcaataccgccctgcgcccagtcgctggcgccctgggtcatggcgcgcttgctgaggatggccacccggtgggtgtcggccagttgcagcgcgaccgtaaggccggccaggccgctgccgacgatggcgacgtcgaaattcatggtgcggagtgcgctgggggggcgccaggcaaaaaggaggaaacgggaaagtctacacctgaagcgccatcccgcgcatcagcgcgtcgcgtgggggtgggcgcttatcgccccgcaggcctgcgcggcgcgcaggcaacaaaaagccccgcggcatggcggggctttctggcgggaaccgggatcaattacttgatcttggtttccttgtaagcgacgtgcttgcgggcgacgggatcgaacttcatgatctccatcttttccggcatggtgcgcttgttcttggtggtcgtgtagaaatgacccgtacctgcggtcgattccagcttgatcttgtcgcggccgcctttgcttgccatgatgtgctcctaattagacttcgccgcgtgcgcgcaggtcggcgagcacggagtcgatgcctttcttgtcgatcaggcgcaggccggcgttcgagacgcgcaggctcacccagcggttttcggattcaacgaagaaacgacgattctgcaggttgggcagaaaacggcgcttggtcttgttgtttgcgtgggaaacgttgttgccgaccatcggcgctttcccggtcacttgacagacgcgtgccatgaagcactcctaaatcttctattcgtggacaatgttcgcaacagatcaacaaaaggcgcgcgggcccggactgcagcggttgagacttcagcaaaacgggcattatagaccggattccctcgccgaatcaatgccttctgtgctttggcgttatccggtgttgctgcgctgtatgtgccgtggcgttggcgtcacagcccgggcaggcggtcgcagcagtcggccagcgagcggatttcctggccggccacgatgaaatggtcgagcagccgcacgtcgatcagatcgagggtgcgcgccagttcgtgggtcaggcggatgtcgctctggctcggcgcggtggtgccgcgcgggtggttgtgcgccacgatgatgccggccgcattatgcacgagcgcctggcgcgccacctcgcgcgggtagacggcggtgcgcgtcagcgtgccgcggaacatttcttcactggccaccatgcggttgcgcggatccaggaacaggcacaggaagacctcgtgcggcagcggcgccagcgtcaggcgcaggtagttgcgcaccgccgccgggccgtcgaagccggtgggcaggcgcagcgattcggccagcgcacgccgtgccagctccggaatggcctgcagttgggcatacttggtttcgcccatgccccggacgcttgtcagtgcgcgcccctcggccgcgaacagggctgtcagcgagccgaagcggtgcaacagctcgcgtgcgaggtccacggcgcttttgccggcagcgcccacgcgcagcaggatggccagcagctcggcgtctgacagggcggcggcgccgctttccatcagtttctcgcggggccgctcgcaggcgggccagttggcaatggtcatgagcactccagggtagtcacgccgtgatgagggtgaggccgggtccgggggcggcgggcaatgggccagtcgaatacaatacgggttgttgaccggttgatcacccatgaatttgcaaactttcgcgtcggaaaccgacggcggcacggctggccgcaagactgtccaggccgactctttcctgaccctgcactacagcatcgcgctcgagaacggcaccgaggtcgtcagcacgttcgaggagaagcccgccacgctgctgctcggccagggccagttcgcgccgacgctggagcaggcgctgctcggcatgcccgaaggcgagcgcatgacctaccggctggcgccggagcaggcctttggcccgcgcaaccccgagctgctgcagtgggtgtcgctggccacgctgcgcgagaacagttccttcgaagaggactacagccctggcgacctggtggagttcaacgcgcccggcggcggcaagtacgccggtgtgctcaaggagttcggcgagaccgccgcgctctttgacttcaaccatccgctggccgggcagaccatcctgttcgacgtgcagctgatcggcattctctgagcgcgccgcacgtgtgccgaaccatcctgataccgcagcatgcctgacctgactcccgcacccgacgcagaaatcctgatggcgcagccgcgcggcttctgcgccggcgtggaccgtgccatcgagatcgtcgagcgtgcgctcgagcgcttcggcgcgcccatctacgtgcgccacgagatcgtccacaacgcctatgtggtggccggcctgcgccgcaagggcgcggtgttcgtgcgcgagctcgacgaggtgcccgcgggcgccaccgtcatcttcagcgcccatggcgtgtcgcgcgaagtgcgtgccgacgccgccgcgcgcgggctgcacgtgttcgatgccacctgcccgctggtgaccaaggtgcatgtcgaggtgagcaagatgcgcgccgagggctgcgagatcgtgatgatcgggcatcgcggccatccggaagtggagggcaccatgggccaggccagcagcggcatgctgctggtggagtcggtggccgacgtcgccacgctgcaggttaccgacccgtcgcggcttgcctacgtgacccagaccacgctgtcggtggatgagacccgcgagatcgtggccgcgctcaaggcgcgctttccgcaaatccgcgagcccaagaagcaggacatctgctatgccacgcagaaccgccaggacgcggtgaagttcatggcgccgcaggtggaggtggtgatcgtggtgggcagccccaacagctccaactccaaccgcctgcgcgagctggccgagcgcctgggcgtgccggcctatatggtggacgcccccgagcaggtgcgccccgaatggatcgccggcaagcgccgcatcggcctgaccgccggcgcttcggcgcccgaggcgctagcccagtccatcgtcgagcgcctgcgtgagcttggcgcgagccaggtgcgcccgcttgacggcatcgaagagaacatggccttcccgctgccgcgtgggctgctgccggccagcgccgccgcgtgacccggtgcgggccgtgcccgcctgccagccccgccttttacaagggcgccgcttgatgcggcgccctttgtctttggtacgcccgatttgcagccggccggcgcgaataatgcacggcgatggtgcaggtaatacatggctgtcctgctgatcagacaaatcagggtaatcccccggtttggggttttccctattatggtgcggcgctacattctgcacattagagaacggtgcagctgaatttaaatgaaacacctaattaataaaggcgcattataggtggtgccggcgatgcttatccgcgccaccgggcggcgcaggcacgattcttgtaagtaggtgaggcggccgcgtcatgtgagtgggaattgccgcaatctgtgcattggggaaattccctagctcatttgaccggtaaatggttaaggatgttgcgtcgcgtattgcatcgactaagaaaggggatacaatgcgcgcgtttcaaattgaaactaaacaaaggcggtccagggaaacgtccgggaggcgttgaaaatccctgtcttcgtgaatcctaggagatcactcatgcaaatcacgtttgccaagattctgccgattgcggccgcagtggcgctggtagccgcttgcggcaagaaggaagagaagccggctgatgcggcgccttcggcgccggcggcagccgctcctgcagcgggcggcggtgaagtcgtcgtcaagatcggccacgcggccccgctgaccggcggcatcgcgcaccttggcaaggacaacgaaaacggcgcccgcctggccgtggaagaagtcaacaagaccggcctggagatcggtggcaagaagatcaagctggaactggttggcgaagacgatgccgccgaccccaagacgggcacctccgtggcgcagaagctggtcgacgccaaggtggtggccgtggtcggccacctgaactcgggtacgtcgatcccggcctccaagatctatagcgatgccggcatcgtgcagatctcgccctcgtccaccaacccggactacaccaagcagggcttcaagaccacctaccgcgtggtggccaccgatgcccagcagggcccggcactggccaactatgccagcaagacgctccatgccaagagcgtggcgatcgtcgacgacgccaccgcctacggcaagggcctggccgacgagttcgagaagaccgccaaggcggccggcgtgaacgtggtggcgcgcgaggccaccaacgacaaggccaccgacttcaaggccattctcaccaagatcaagggcaagaagcctgacgtgatcatgtacggcggcatggacgccaccggcggcccgttcgccaagcaggccaaggaactgggcatcggtgccaagatcgtcggcggcgacggcgtctgtaccgacaaggtggccgaactggcgggcgacgccgtgaccaacatcatctgctccgaggccggcctggccctgtcgaagatggagcagggcgcggacttctccaagcgctaccaggctcgcttcaacgccccggtgcagatctatgcaccgttcacgtatgacgccgtgatggtcgtcgtcgacgccatgaagcgcgccaactcgaccgaaccggctgccatcctggccgaaatgcccaagaccaactacaagggcgtgatcggcaatatcgccttcgacgagaagggcgacatgaaggaaggcaccatcacgctgtacgagtacaaggacaagaagaagttcgtcctcgacgtcgtgaagatgtaatctgggcttaccggcccatccgaacggcaccgtgagtattttgcggtgccgttctttttagcctcgcctaatgtagaagcatccttaccatggatggagcagggcaggtcgcttaccagcaaaccaaccaccgcaacgttacccattacacaccatggtcccgcccccggcatccacaccatgccgcaaggtccgggactgaagcaggagttttcatggatatccttatccagcagatcgtgaacggtctggtgctcggcagcatctatgcgctgatcgcactgggctacaccatggtctacggtattctcggcatcatcaacttcgcccacggcgatgtgctgatgatcggcgcgctgaccgccctgtcagccatcctcggattgcagaagttcgcccccggcctgcctgaatggctgacgctggtgatcgccacgctggtcgcgatgccagtctgcgcgatcctgtcctattcgatcgagcggatcgcctaccggcccttgcgcaatgcgccacggctggccccgctgatcaccgccatcggcgtctccatcatcctgcagacgatgggcatgctgatctggtcgcgcaacccgctgaccttcccgcagctgctgccgtccgagccgatcgacatcggcacgaccggcgccaccatcaccggcaaggaaatggtcatcatcggcatggccgtgatggtgatgtccggcctgctggccctggtcaaccgcaccaagctcggccgcgccatgcgcgccaccgccgagaaccagaaggtggccggcctgatgggcgtgaaccccaatttcgtcatttccgccaccttcatgatcggcgccacgctggccgcgctggccggcgtgatgatggccaccaactacggcaatgcccacttctacatgggcttcatccccggcctgaaggcgtttaccgccgcggtgctgggcggcatcggcaacctggctggcgccatggtcggcggcatgctgctgggcctgatcgaagcgctcggcgccggctatatcggcgacctgaccaacggcgtcttcggttcgaactaccaggacgtctttgcctttatcgtgctgatcaccgtgctcgtcttccgtccgtccggcatcatgggcgaacgcgtggcggatcgcgcctgaggagagcgaatccatgaatactccgattccatccacggcagccgtcgcggcgcccaccaaggtgccggccaagaccctggccgcactgattggcttcctggtgatcgccctgtgcgcaccgttcttcgtccagaccctgggcggcaactactgggtccgcgtgctggacttcgcgctgctgtacatcatgctggcgctgggcctgaacatcgtggtgggctttgccggcctgcttgacctgggctatatcgcgttctacgcggtcggcgcctacctgatggcgctgctgggctcgccccacctggcgaaccagttcgagtggatccagcaactgttccccaccggcatccacctgtcgatgtggttcgtgttgccgatcgcgatcctggtagccgccaccttcggcgtgctgctcggggcgccaacgctgaagctgcgcggcgactacctcgccatcgtgacgctgggcttcggcgagatcgtccgcatcttcatgaacaaccttgaccgcccggtcaacatcaccaacgggcccaagggcatcaccgcggtggacccggtccatatcttcggcttcgacttctcgaagtcgcacgagatcttcggactcaagttcacgccggtgttcatgtactactacctgctggtgttcctggtcatcgtgatcgtgttcgtgagcctgcggctgcagacctcgcgtatcggccgcgctttcgtggccatccgcgaagacgagatcgccgccaaggcgatgggcatcaacacccgcaacatcaagctgctggcctttgccatgggcgcttcgttcggcggcgcctcgggcgcggtgttcggcgcgttccagggcttcgtgtcgccggaatcgttcacgctgtgggaatcgatctacgtgctggccatcgtggtgcttggcggcatgggccatatcccgggcgtgatcctgggcggcgtcctgctggtgggcttccaggagttgctgcgcgtggtggcggagccgatgcagaccggtttgttcggccatgtcatcgtcgatgccgaagtgctgcgccagctgctgttcggcctggccctggtcggcgtcatgctgtatcgcccggcgggcatctggccgtcgccgcgcaaggaagaccgcccggtggtgcgccgtgcgggcagcgtgggccgtttctgaccaggaggacaacatgagcaacaacgatttcctcctgtcggtacagggggtcaacaagcgtttcggcggcctgcaggcactgtccgaggtgggcctgcagatcaagccgggcgagatctacgggctgatcggccccaacggcgccggcaagaccaccttcttcaacgtgatcaccggcctgtacacgccggattcaggcgagttcgtgctgggcggcaagccctaccagccgaccgccgtgcatgaggtcgccagggccggcatcgcgcgcacgttccagaacatccgcctgttcggcgagatgactgcgctcgagaacgtgatggtggggcgccacgtgcgctccaaggccggcgtgttcggcgcgatcttccgcccgcccgcggtgcgccgcgaggaagagggcatcgaggacatggcgcacgacctgctcgactatgtcggcatcggcaagtacgccaacttcaccgcgcgcaacctctcctacggccaccagcgccggctcgagatcgcgcgggcgctggcgaccgagcccaagctgctggcactggacgaaccggccgcgggcatgaacgcgaccgagaaggtggagctgcgcggactgctcgacaagatccgcaacgatggcaagaccatcctgctgatcgagcacgacgtgaagctggtgatgggcctgtgcaaccgcatgacggtgctggactacggcaaggtgattgcccagggcctgccgcacgaagtgcagaacaaccccgcggtgatcgaggcctacctcggcgcatcggcacactgatggccggaggacaagcaatgacacagacagtactgaagatctccggcctcaaggtcgcgtacggcggcatccaggccgtcaagggcattgacctggaaatccgggacggcgagctggtgacactgatcggcgccaacggcgccggcaagaccaccaccatgaaggccatcaccggcctgcagggctgggccagcggcgacgtggaatacatgggcaagtcgatcaagggcgtgcccagctacgcgctgctcaagcagggcctggcgatggtgccggaaggccgcggcgtgttcgcgcgcatgaccatcaccgagaacctgcagatgggcgcctacacgcgcaacgacgacgccggcatcaaggccgacgtcgagcgcatgttcggcatcttcccgcgcctgaaggagcgcgccaaccagctggcgggcaccatgtccggcggcgagcagcagatgctggcaatggcgcgcgcgctgatgagccagcccaaggtgctgctgctggacgagccgtcgatgggcctgtcgccgatcatggtcgagaagatcttcgaggtcgtgcgcgacatctcggcacagggcgtgaccgtgctgctggtggagcagaacgcgcgcctggcgctgcaggctgcccaccgcggctacgtgatggagtcgggcctgatcaccatgagcggggacgccaagcagatgctcgacgatcccaaggtgcgggccgcctacctgggcgagtaaggcgcgcgctgccgcctcccaccccgccgcaagaggggtgagggagagggcaggcgcacgcaggcgcaaggcctttccccttgccgcggggccccgcgcaacgcctgctcaggctggtgtgcgcgggttctgcggcgctggctctctccctcactcctctgcggcaccacaaagaaaaaagcctcgcgcgcgcgaggctttttttccgtctggcgaatgaccaggactcaggccagcttcttcagcagcgtgcgcagcatgccgatcatctggtcgatctcttcacgcgtcacgttcagcgcgggcatgaagcgcagcaggttggcgcgcggtgcgttcagcagcaggccttgcggcaccatgtcgcgggcttcttccaccagttgcgggccgatgtccttgcccagcatcagcgcgcgcagcaggccgtcgccgcgttcgccggccaggccgaactcggcggacagcgccagcagctgttcccgcaggtattcgcccttggccttgacgtcgtcgaggaaccccggcgcggtcagctgctcgatcacggcgctgcccaccgcggtcatcagcgggttgccgttgtaggtgccgccctggtcgccggcctcgaagctggcgacctcggccttgcacagcagcgccgacagcggcacgccgccgccgatgcccttgcccagcgtcatgatgtccggctccacgcctgccagctcgtaggcgaacagggtgccgcagcggccgcagccggtttgcacttcatcgacgatcagcagcagcctgtgcttgtcggccagcgcgcgcaggccctgcatgaactcgcgcgtggcggggatcacgccgccttcgccctgcaccggttccagcatgatgccgacggtcttgtcggtaatcagcttctccaccgaggccaggtcgttgagatcggcgcgcgggaagcccggcacctgcggcgcaaagatggtgtcccagccggccttgcccgacgcgctcatggtggcgagcgtgcggccatggaagctgtggtccatggtgatgatctcgaaggcgccgtccttgtgcttgcggccccatttgcgcgccagcttgatcgcgccttcgttggcctcggcgccgctgttggcgaagaagaccttgtcgaagcagctgtggtcggtcagctgccgggccagcttgagcatcggctcgttgtagaaggccgggctcgggttgatcagccggtgcgactgggccaccagcgcgtcgatcatgccctggttggaatggcccagacagttcactgcccagccctgcacgaagtccaggtatcgcttgccgttgtgatccgtcagccaggagcccttgccctcggtgaacacgagctcgggccggttggtgatgtacatcagggattggacgggatactcagcaaatgccatggcggactccaggggtcggctttaaacgatggacggacgggcgtaacaaccgggacaaaaacaaaaagccacgggggttgcccgtggctcgttgacatgaacagacgcagtcgacggtcagccgcgcggcaccccagcggggagcgacgtacggaagctgcggcgtcggttgaaggtcatgtgcatgcgggcaaatataaggcgcatgcgcccgggtgtcaaaacgaattttggctggcccgggcattgttgcgctgagggaacggctctcgggcggcctcaggccgcgggagtggccgggtgcatgtcggcctcggaggtgaacgagtcggcgaagaacgcgtcctcgtgcagcttgcactggcgggtgaagtcgccgcgcgcggcattgatcatcaccggggcgccgcaggcatagacctcgtggccggacaggtcgggatggtcggcgatcacggcctggtggacaaagccggtgcggccctgccagttgtcttcaggcagcgcgtcggagatcaccggcacgtagcggaagttgggcagctcgcgcgcccactgctcgcacagcgcgtgcatgtacaggtccttgggccggcggccgccccagtacagggtcatcgggcgctggatgccggtgtaggcggcgtgctcgacgatggccttgatcggcgcaaagccggtgccggaagccagcaggataatcggggcctcggactcctcgcgcaggaagaagctgcccagcgggccctcgaagcgcaggatgtcgcgctccttcatggccggctggccttccctggcgccgaaaacatagtcggtgaaggcgccgccgggcatatggcggatatgcagttcgatcgggccgtcttcatgcggcggcgtggcgatcgaatagctgcggcgcttgccgtcgcgcagcaggaattccacgtactggccggccaggtactgcatgcgctcggtcgccggcagctgcagcttgatggcgatcacgtcgtcggccaggcgctcgatcgcggtcacgcggcacggcaccttcttgatcgggatgtcgcccgcgccgtggacctcgcggcactcgatggtgacgtccgaggcggcgttggcgcagcagaacagggcgcggccctcggttttctcctgcgcggtcagtgccgccggggcgtggtcgccctgcacgatggtgccttcgagcacgcggcccttgcacgagccgcaggcgccgttcttgcagccgtagggcagcccgatgctgtggcgcagggccgcgccgaggatggtttcgtccgctgccacttcaaacttgtggccgctgggcatgacggttacttgataagccataatcggtctatgagccaaattctgtcgaagctgcagccctcgcgcctcccacaagtcccgcggctgccggcgccttcgcgccggctgggccgcccgcgcctgttgatcgtcggctgcggggatgtggggacgcgctgcctgcgaatcctgtcgtcgcgcatgcgtgtctttgccgtgacctcacagccggcgcgccgggctgaactgcgcgccgccggcgcggtgccgctggtggcggacctggaccggccggccacgctggcacggctgcatgggctggccacgcaggtgctggacctggcgccgccgcccgggcagggcgaaggcgatccgcgcacgcgtgccttgctcgccgccttgcgccgggcggcctggcgcaaggccaggacgtcggccggcatgcttcccggcgagcccgccattctacccgaccggggcaggccccgcgctgcgtttgtctacgccagcacgtcgggcgtgtacggcgaccggcagggcgcccgggtctcggaattccacgccgtgcggccccagaccgcccgcgcgcgccgccgcgtggccgccgagcaggcagtgcgcggcttcggccgcgatgccggctggcgtgccagcatcgtgcgcatccccggcatttatgccgaagaccgcctgccgctggcgcgcctgcaccgcggcacgcccgcgctggtgccgcaggacgatgtctacaccagccatatccatgccgacgacctggcgcgcactatggtcgcggcgctgttccgcggccgcgcgcagcgcgtggtccatgccagcgacgacaccgagctgcgcatggccgattacttcgacctggtcgcggaccgccgcggcctgccgcgcccgccgcgcatcacgcgcgggcaggcgcatgaagtgatcgacaagacgctgctgagtttcatgagcgaatcgcgccgcctcgacaaccgccgcttgaaacgcgagctgcgcctgcgcctgcgttacccgactgtcacctccttcttcgacacctgaccgccttgccggcgcgtcccagtgcggctggcacggggtttgctgtgcctttgcgtcgtttttgtcctgtctatacagcagcacttccatcgccccggcctggtgccgacactgcaatccgtgaaccggggtggtgcgaggcctgttgaggactccccgctctggaaagcgcctttcaaggtgtttatccgcctggatgcttggtggaagccctacgttgacttgtatatacaggtactgtttaatgtccgaaaacgagcgcggccacacgcatggcctgccgtcgacggacacaccaaaggagcgtacagatgaggaatcacagcaggattcgcggtcggatggcagtgcaggccgcggtgctggttgcggcattgggggccggtgcggcccaggcgcagaatacccaggtcacgctgggcatgagcggctggaccggtttcgcgccgctgacgctggccgacaaggccggcatcttcaagaagcatggcgtggacgtcgacatcaagatgatcccgcagaaggaccgccacctggcgctggcctcgggcgcgatccagtgcgcggccaccacggtggaaacgcatgtggcctggaacgccaacggcgtgcccatcacccagatcgtgcagctcgacaagtcctacggcgccgacggcctggccgtgcgcagcgacgtcaagagctttgccgacctgaagggcaagaccatcggcgtcgatgcgccgggcaccgcgccgtatttcggcctggcctggatgctgaagaagaacggcatgacgctcaaggacatcaagaccaccacgctgtcgccgcaggcggccgcgcaggccttcgtggccggccagaacgacggcgccatgacctatgagccgtatctgtcgacggtgcgccagaacccggacaagggcaagatcctggcgaccacgctcgactacccgatggtgaccgatacgctgggctgcgcgccgaagtggcttaaagagaatcccaaggccgcgcaggcgctggtcgacagctacttcgaggccctggagatgatccggaaggagccggccaaggccaacgacatcatgggcgctgcggtcaagcagaccggcgagcagttcgccaagtcctccgcctacctgcgctggcaggaccgcgaggccaaccgcaagttctttgccggcgagcttgccagcttcagcaaggaagctgcggcggtgctgctggaaatcggcgtgatccgccaggtgccggacgtgacggcgctgtatgacgcgcgtttcctcaagtaaccgacagtcttcaggaggcgtgacgtcatgacgcaagccagacttggaacacccgccccggccgctgccgcggcggtccctgccgcagcggcggcgccggtgcgccggcgccacccgtggctggccccgctggtgccggtggcgcccaacacgcgctggatgctgggcctgtccttcttcgtgctgttcttcggcatctgggccgtggtaacgctgggcggcttcgtgccgcgcacgttcctggccgatccgatgacgatggccaaagagggcttcatcctgttcaccgagcacaacttcatcggcgacatcggcatgaccgtgtggcgcgtggtcggcggcttcgtgctggcggcggtgctggcggtgccgctgggcatcttcatgggcgcgtacaaggcggccgaggcgttcttcgagcccttcgtgtcgttctgccgctacctgcccgcgtcggcctttatcccgctgctgatcctgtgggccggcatcggcgagacccagaagctgctggtgatcttcatcggctcgttctttcagatcgtgctgatggtggcggtggccgtcggcggcgcgcgcaaggacctggtggaggcggcctacacgctgggcgccaacagcgccggcatcgtgcggcgcgtgctgatccccggcgccgcgcccgagattgccgagatcctgcggctggtgctgggctgggcctggacctacgtgatcgtggccgagctgatcggctcgtcgtcgggcatcgggcacatgatcaccgacagccaggcgctgctcaataccgggcagatcatcttcggcatcatcgtgatcggctgcatcggcctggtctcggaccttgtcttcaagcgcgccaaccagcgcctgttcccgtggagttcgatccaatgagcgcactgtccatccagcaggtctcgcgcaccttctccaacccgcgcggcggccagaccctggcgctgcagccggtcgacttcgaggtccgcgacaatgacttcgtcaccatcctcgggccttcgggctgcggcaagtccacgctgctgcgcatcgtcgcggggctggatacgccctccagcggccgcgtgctgctggacggccagccggtgtccgcccccggcgcggaccgcggcatggtgttccagtcgtacacgctgttcccgtggctgacgatcgagcagaacgtgcgcttcggcttgcgcgagcgcggcatgagcgccgccgagcagaaggagcgcagcgacttctttatccagcgtgtgggactgcgcggcttcgagcaccatttccccaagcagctgtcgggcggcatgcagcagcgcaccgcgattgcgcgcgcgctggccaacgatcccaagatcctgctgctcgacgaacccttcggcgcgctcgacaaccagacccgcgtgctgatgcaggagttgctgctgggaatatgggaggcgtcgcgcaagacggtattattcgtgacccatgatatcgacgaggccattttcatggccaaccgggtggcggtgttttctgccaggccgggtcggatcaagagcgagatcgcggtggatttcccgcatccgcgccattacaccgtcaagaccactccggagttctccgcgctcaaggcgcggctgaccgaggagatccgcgccgaggccatggcctcggccgagcactaggcatccaaccaacgccatgaaccacgccgccggcaccgcctcttccgcttctgcctctcccaccgcgctctaccagcaggtgaaggagtacattgcccgccagatccagagcggcgcgtggcagccgggcgaccgggtgccgtcggagcaggagctggtgaaccgcttcggcgtctcgcgcatgaccgtcaaccgggcgctgcgcgagctgcaggagcagggccgggtggtgcgggtggccggcgtgggcaccttcgtggcggagcacaagccgcagtcgacgctgctgtccgtggtcaacctgcaggacgagatccgcatgcgcggccatgactatgcctgcgacgtgatcctggtggagcgtgtgtcggcatcgatcgaggtggccgccgcgctggagctgcgcaccggcgagtcggtgtaccactcggtctgcgtgcatcgcgaggacggcgtgccggtgcagctggaggaccgctacgtcaatgcgcgcgtggccccggacttcatcagccaggacttcagcgagacccagcccggcgaatacctgctgcgccatgtgccctacgatcaggtagagcacgtggtcgatgccattgccgcgacgccggagcaggccgcgcaactggaaatgccgcccacgcaaccttgcctgatgctgacgcgccgcacctggaccaacggcgtgccggtgacctttgtgcgctgcctgcatccgggcaaccgctaccgcctcggcagccgcttccgcgccgacggcaaccctgctttcggctgaatccacaggatccggccgcatggttcaactttttactctaagctgtatagacaggaacatacaaatgagcgccagccaacacgacgaccaagcttcccgcccgctgctgaccctgcagccgggccaagtcaccctggccgacctgcgccgcatctaccgcggcgaagtgcgcctggccatggccgaatcggcctgggccggcgtgcgtgccgcgcaggccacggtgcaggacatcatcgacgccgatgccgtggtctacggcatcaataccggcttcggcaagctggcgcagacccgcatccccaatgacaagctggcgcagctgcagcgcaacctagtgctgtcgcacagcgtcggcaccggcccggacctggccgaagacacggtgcgcctgatcctggcgatcaaggccgtgagtctggcgcgcggccattcgggtgtgcgcccggaactgatcgaggcgctgctggcgctggccaaccacggcgtgacgccgtgcatcccggccaaggggtcggtcggcgcctcgggcgacctggcgccgctggcgcatatgtcgtgcacgctgatcggcgtgggcgacgtgctggtcgacggcaagcgcgtgcccgccgccgagggcctggcgcacgccggcctgcaggccttcgagctgggccccaaggaaggcctggcgctgctcaacggcacccaggtgtcgaccgcgctggcgctggccggcctgttcgccgccgaagacgcctttgccgccggactggtggcgggcgcgctgtcgctggaagcgatcaagggctcggtcaagccgttcgacgcccgcatccatgaggcgcgcggccaggccggccagatcgccgtggccggcgccgtgcgcgcgatgctggacggcagcgagatcgtcgactcgcacaagacctgcggccgcgtgcaggacccgtactcgatccgctgccagccgcaggtgatgggcgcgtgcctggacaacctgcagcacgccgcgcgcatcctgcagatcgagtccaacgccgcctcggacaacccgctggtgttctccgcgcagggcgacgtggtctcgggcggcaacttccacgccgagccggtggcatttgccgccgacatcatcgcgctggcgattgccgagatcggcgcgatttccgaacgccgcctggcgctgctgctcgataccgggctgtcgggcctgccgccgttcctggtgcgcgacggcggcctgaactcgggcttcatgattgcgcaggtaaccgcggccgcgctggcctccgagaacaaggcgctggcgcatccgtccagcgtcgacagcctgccgacctcggccaaccaggaagaccatgtgtcgatggccacctacggtgcgcgccgcctgggcgagatggccgccaacaccgcagtcgtggtcggcatcgaggccatggccgcggcgcagggcatcgagttccaccgcccgctgaagtcgtcgccgctggtggagcaggaactggcccgcatccgtgcgcgcgtggcctttgtcgaagaggaccgctacctggcaccggatatcgaagcgatgaagcaatgggtggtgcagggcgatgccggcgccggctggcccgatgccgtgcgcgcgatcctgccgaccaacctgtcgtaacgcgccccgcgccgacactgccagaccagacccgcagcaggagaacaagacatgaacgccaacgaaaaccaattcatccagcgcggccagcgcgaaatccgcgccccgcgcggcagccagctgcactgcaagaactggctgatcgaagccgcctaccgcatgatccagaacaacctcgacccggacgtggccgagcgtccgcaggacctggtggtctacggcggcattggcaaggcggcgcgcaactgggagtgcttcgacgccatcctggacagcctgcgccgcctgggtgaggacgagtcgctgctggtgcagtcgggcaagccggtgggcgtgttccgcacccatgccgatgcgccgcgcgtgctgatcgccaactccaacctggtgccgcactgggccaactgggacaagttcaacgagctggaccgcgccggcctgatgatgtacggccagatgacggcgggctcgtggatctacatcggcacgcagggcatcgtgcagggcacctacgagacctttgtcgaggccggccgccagcactacaacggcgacctgtcgggcaagtggatcctgaccgccggcctgggcggcatgggcggcgcgcagccgctggcgggcgtgctcgccggcgcctgcgtgctggcgatcgagtgccaggagtcgcgcatcgatttccgcctgcgcacgcgttatgtcgacaagaaggccaccacgctggatgaagcgctggcgatgatcgccgaggccacgcagaagaaggaagcgatctcggtcggcctgctcggcaacgccgccgagatcctgccggaactggtcaagcgcgcgcaggccggcggcatgcgcccggacatcgtcaccgaccagacctcggcgcacgacctggtcaacggctacctgccggccggttggaccgtcgctcaatgggaagcggcgcgcacgcaggatcccaagtcggtggaagccgccgcgcgcccgtccatcgtcaagcacgtgcaggccatgctcgacttccagaagatgggcgtgccgacggtcgactatggcaacaatatccgccaggtcgcgttcgacgagggcgtgaagaacgcctttgatttcccgggcttcgtgccggcctatatccgtccgctgttctgccgcggcaagggcccgttccgctgggtcgcgctgtcgggcgatccggaagatatctacaagaccgatgccaagatgaaggagctgttccccgaggacaagcacctgcaccgctggctcgacatggcgcacgaccgcatcgccttccagggcctgcccgcgcgcatctgctgggtggggctggatgaacgccaccgcgccggcctggccttcaacgagatggtcaagtcgggcgagctgaaggcgccggtggtgatcggccgcgatcacctggactgcggctcggtggcttcgcccaaccgcgagaccgaggccatgcgcgacggctcggatgcggtgtcggactggccgctgctcaacgcgctgctgaacaccgcgggcggcgccacctgggtcagcctgcaccacggcggcggcgtcggcatgggcttctcgcagcattcgggcgtggtgatcgtgtgcgacggcaccgatgccgcggccaggcgcatcgagcgcgtgctgtggaacgacccggccaccggcgtgatgcgccatgcggacgcgggctatgacatcgccatcgaatgcgcgcacgagaagggcctgaacctgccgatggtgaagggcgcatgagcctgacgctatttcaacggttcgcgctggccgagatcgcgcccacgcgctggaagaacggcggcggcaacacgcgcgagatcgcggtgtggccgccgggcgccggcatggatgacttcatgtggcgcctgagcgtggccgatatcgggcaggacgggccgttctcggcgtttcccggcatcgatcgccagatcgtgctgctggagggcgccggcgtgacgctgcgtgcggacgacgccagcttcagccatcgccttgaccatatcggcgagccgttcgccttctccggcgataccagcctgcaggcgacgctgatcgacggcgtcacgcgcgacttcaacgtgatgacgcggcgcggccactgccgcgcgcgcgtcgaggtgttccggcaggggttcgtgcctggcaccggcggccatgccgtctgcctgctggccgtcagcggcgcatggcaggcgcaggatgccggcctgctgctgcaagcgggcgaaggagcgctctgcggcgctgcggaacccccatccacgccatcgtttgaacctgtgggtgacgcggccctgtgcctgtgcgtcacccttgagacggagcccggtcaatgacgctgccctctgtatcgtccgcgcccagcgcggacggcgtctggcacaactgccacctgctgcccgatgccgatccggcgcacgcgatccgcgatgccgcgctggtggtggagcatgggcgcatcgcctggctgggtgccacggcggacctgccggatgcctatcgcggcgcggcgcgccatgatgcacacggggcatggattacgcccgggctggtcgactgccatacgcacctggtctacggcggccagcgcgccgacgagttcgcgatgcggctggccggcgccggctacgaagagattgcgcgcgccggcggcggcatcgtctcgaccgtgcgcgccacgcgtgccgcagatgaagacacgctgtttgcccaggccgccgcgcgcctgcagccgctgctggccgagggcgtcaccgccatcgagatcaagtcgggctacgggctgagcctggaagccgagcgcaagcagctgcgcgtggcgcgccggcttggcgagcacttcgggatttcggtctacacgaccttcctgggcgcgcacgcattgccgccggagtacgcgggccgtgccgacgactatatcgacctggtctgcaacaccatgctgccggcactggccggggaaggactggtcgacgccgtcgatgccttctgcgaatcgatcggtttctcgattgcacagaccgggcgcgtgttcgaggcggcggcgcgccatggcgtgcgcgtcaagctgcatgccgagcaactgagcaacctcggcggcgccgcgctcgccgctcgccaccgcgccttgtccgccgatcacctcgagcatctcgacgaggccggcgtcgcggcgatggcggaggccggcacggtggcggtgctgctgcccggcgcctactacttcctgcgcgacaccaacctgccgccgatcgcgctgctacgccagtacggcgtgccgatggcaatctcgaccgatcacaatccgggtacgtcgccggtcacttcgctgctgctgatgatgaatatggcctgcaccctgttccgcctgaccgtgcccgaagcgcttgccggcgtgaccgtgcacgccgcgcgtgcgctgggcgcatcggatcgccacgggcggctggaagcagggcgcgtggccgacttcgcgctgtggcgcatcgattcgcccgccgagctggcgtactggttcggccgcaacccggtcgcgacggtggtgcggcaagggcgtgtgcatgcgcacgaaggagcctcggcatgagtggctcgcaactcttcgctccgtttgcgctgctgccggccggctgggcgcgcgatgtgctgctggcctgggatgagcagggccgcttcaccaccgtgcagcccggcacggagccagccgcaggcgtgccgcatgcggccggtcccgtgctgcccggcatgcccaacctgcactcgcatgcgttccagcgcggctttgccggcctgacggaattccgcagccgcccgcagggcgacgatccggcgggtgccgattcattctggagctggcgcaccctgatgtaccgcttcgcgcagcggctctcgcccgacacgctggaggccatcgccacccagctctatatcgagatgctgcgtgcgggctacaccagcgtgtgcgagttccactacgtccatcacgatgccggcggcacgccctatgccgatgccgccgagatgtcgctgcggctgctgcgcgcggcccggcgtactggcatcggcatgacgctgctgccggtgctgtaccagaccgccggctttggcggcaagccgccgctggccgagcagcgccgcttcctgcacgacaccgacgcgatgctgcggctgctggaacggctggcccccgcgtgcgcgcagtccggcgcgaggctggggctggcaccgcactcgctgcgcgcggtgccggaggaaagcctcgcccacgcactggcgggactgcaggcgatcgacccgcaggcgcccatccatatccatatcgccgagcagcagaaagaggtcgacgattgcatcgcgtggtcgggcacgcgcccggtgacctggctgttcgaccatgtagaggtcgacgcgcgctggtgcctggtgcacgccacccatatggactgggacgagcgccggcgcctggcgcacagcggcgcggtggccggcatctgcccgaccaccgaggccaacctgggcgacggcgtgttcgaggccgcgccctacctggcgcagcagggcgcatggggcatcggctccgacagccatgccagcgtcagcgtggccgaggagctgcgcttgttcgaatacggccagcggctcggcctgcagcggcgcaatgtgctggcctccgacacgcatgcacaggtggccgaccggctgtatctcgaagccgtggctggcggcacgcgtgccagcggccgcgccgtggcggggcttgtgccaggccagcaggccgatttcgtggtgctggatggcgcccatccgacgctggcgggcctcgacgggccgcaggcgctggccacgcatgtgtttgcctgtcatggtcatgagacactagcggatgtccgcaccgccgggcgcagccgcgtgcagcatggcgcgcatccgctgcaggcggatgcggggcgcctgttcatcgcggcgcgcgccagcctgctggccgactgactgaaaccgggcgcacgcccactgcatcgcaaagacaatgtccttctccaccgatacccccgccttcaccctgcatcgcggcacgcgcccgttgctggtatcgatgccgcacgtcggcacgcacctgccggcttcggtctcgcagcgcctgacggccgaagcgcgcaccgtgcccgacaccgactggcacctggaacgcctctacagcttcgcccgcgagctgggtgcgtcggtgctggtggccacgcattcgcgctacgtggtcgacctgaaccgaccgcccgataacgccaacctgtatcccggccaggacaccacgggcttgtgcccggtcgacaccttcgacaagacgccgctgtacgtcgacggcaacggccccgacgatgccgaaatcgccgcgcgccgcgatgcgatctggcgcccgtaccaccaggcgctggccgcggaactggcccgcctgaaggcggagcacggcaccatcgcgctgtgggatgcgcattcgatccgctcggtgctgccgcgcttcttcgaaggcaggctgccggacttcaacctcggcacggccaacggcgagagctgcgacgcgtcacttgcgcatcagctgcttgagcaggctggcgcggtggccggccataccgcggtgctcaacgggcgcttcaagggcggctatatcacgcgccaatacggcaagccgcaggacggcgtgcatgcggtgcagctcgagctgtcgcaggtcgcctacatgagcgagacgtatccgttcgcctacgacgaggcgcgtgcggcggcgttgcagccggctttgcgagggatgctggcgacggtgctggagttcgtcgaaacgcgctaaggcgctggcgcggcacgatggctgccgcgcagcgctgccagctcacgtcaagcgctgaccaagccgcaggcggtagagcgaagtgctggcggcgatgaacaaggcatcgccctcggcgccgccgaaaacgaggttgccgaccttctccggcacgggaatatgcgcaagccgcgtcccgtccggatggaaaacctgcacgccgctggcgctgctggtaaagagccatccgcgccggtccacgcgaaatccgtccggcagtccgggcgcgatgacggcgaagacccgcgggttggccagcacccgtcccgcaacgacgtcgaaggcgacgatatggtgatgaccatcgtcgcgcaatgccgccgaggtatcggagacataaagcacgtcttcatcgggcgagaatgccagcccgttcggctcctcgatcaagtcgctggcgacttccagcgcaccgacggcgggatcgtagcgaaacacatagttgtgtcgcagctcgggatcggcccggtggccttcgcggtccgacaggatcccatacggcggatcggtgaaccacaaggtgccatcgcgcttgaccacgatgtcattgggcgaattcaggcgccgcccctgatagtggctgacgaccagttcgtcctcgccaaggcgggcaccgctgcgatgcgtccgcacgatggcccgctttccgtgcgagcaatgcagcagcgagccgtccgcctccagtgcgtggccgttggtgaacccggcgcccgtacgccagaccgacatgccatccgcggcgctccagcgcaggatgcggtcgttggggatgtcgctccacagcaccgcatcctcgtcgggcaaccacaccggcccctcgctccaggttgccctgcatgccagttgctcgagccgttcgcccgccagcggcagctcgcgtgcgcgctcatcgaatatccggactgtatccatggtcttcctttatcccgttgcaaagacacccaagcagtctttacacgaactgccacagcaagaggatcaggccaagggctgcgctaccggcaagcgtcgtcagcaccgtccagctccttagtccatcgccgacgctcaggcccagcatccgggtcacgatccagaagcccgcatcgttgacgtgggagaccgccatgccgcccgcgcccatcgccaggccgatcagggccagatggttgggaccgggcgaagcctgcgcgaccagcggggcgatgatgccggccgtggtcatcagcgccacggtggtgggcccctgtgccgcgcgcaacagcatcgccagcaggaacgcgaggacggccagcggcagacccgaagactgcagcgacgtcgccagcgcggggccgattccggtcgacaccaggatcttggcgaaagcgccgccggcgccggtgatcaggatcaccaccgatacggtcgggatggcggcgccggccacctcggacaccgtcgccagcggcgcgccgcgacgggtgcccagcaggtaggcacagagcatcaggcccagcaacagcgcgacgtatgggatgccgagaaacatcagcgccgagcgcccgaagaagccttgcggcaacagcacctgggccagcgtcccggccaggatcagcacgatcggcagcgcgatcagcccggcgacgagacgggcgcccggcggcgcaccgctgcccaggctggcggatgccgcgtggacctttggggcgctgcctgtggcctggcccacttcggcggcgatatcggctgccatatggaacggccgcctggtcagtcgccgcgatgccaggaaagtcaccaggccagtgaccagcgcgatcggcaggccgatcagcagcaggcggccgatctcgatgccgagttccccggccactgccaccatgcccgggtgcggcggcagcagggcatgcaccaccagcaacaccgcgcacaccggcaggccaatcaccaccagcggaatgccgcgggtgcgcgtgagcccgtagaccagcggcatcagcatcatgacgccgacttcaaagaacaccggaatgccgacgccgaatgcggtacaggccatggccagcggcacgcgtttgtcgccgaagcgctcgatcaaccggttggccagcacctgcgcgccgcccgacaattcagtcatgcgtccgatcatcgcgccgaaggcgatgatcacggcgacatggcccagggtcttgcccaggccgccttccaccgcatcggcaatctggctcaccggtacgccggccacgacggcgacgcccgtggccaccaggatcagtgccaggaaggggtgcagctttgcgatcaggatcagggcgagcaacagcaggatcgctgccgcaccgccgaatatcagtattgccacgtctaatccttgtgttcagccggccacgcctgcggccggtgcgtgccggacgacgatgccggctgtgagggaaagctggtgatgccccagccgatgggccgtcgtcgattgcccgggtgcctgggatcggggccccagatcgcctgatacgtgtcgatgcagaagcccgcgcgctgcaatgccagcgcgagcgccgccagcgtcagccaccaggcgcccagcagcagcggcatccagcgcggcgcatcggccagcgcgaggccgatgccgatggttgcgatggcaagcggcagcgaactccagccaatgactttgtgcagccactcgaacaccacccggcgcgcgctcatgtcgtagtggtcgccgcgcaggcagttgctggtgggcccgcccttgctgccgcgcaacagcccgccgcctacctgcagcgcggcgcaggccaccagtgcccagccgccgaggtggtgccagcgcgccagcgtatcgggcatgccgccgccgtggcccaggaccagcagcacgcccaccgacatcagcgcaacgccgctgccctgcatccacaagtgggcgcgccaccaggtcttgcgatcgagcacggcaggccaggcttgcgacggcgtcaccttgaagaagcgggcgaccaggatgccgagcggcagcaacagtccccagctgagcaccatcaggcgcccatgccaggctacccagggcacgacgtggtgcgcggcggcggtaccggaaatcgggcggctcagccattgcgcgggccagccgggcgcggcccgcgcgccgagaatgcagaggcaaagcgtgaggccgagcggcaatatccagcgcacggccgcgggaagcgcaggtggcatttccgatctcctgatgcgcggagaattcctttgaatgggacagagggtggatagcggtggcgaggtttcgctataccgggatcgcccgcgtgctggcgacacgctgtggccggtgttgtgccgccacccttgtctggcgggacgggcgcagctagatggcggttgcggcggccagcaacggcgccgcgtgtgatacgcctgaactgagtgggacagcagcttgcatgaccgaatgtctccatccgccctttcaaagggcggtgatcttattggaatgggtaattggcggcgccgcgcaaccagaatgcggcttgagcctgctgcagagccaatggcctgcgcgcaggaaagtggagacaactatagcaatggctggaatatgcttctaatcaaatgatcgaatctccgatttacctcaggttatcgcttggggattctggaaaacgttgcggtgtcatcgggcgcaggatccgcttgagggtttgatcgcatctcggccccggcataacgcaacactgaacaaaaaagcccggcctgaagccgggctgcgagccacgccagcgaaggcctatttcttcacgacattcttgtcggccttgctccccgtcgccgcgttgtacttctccacatacgcttcgaacaacttgcggatcgagcgcccgatcttggcatagtcagcttcattcaggttggccagcgacacccgccctgacgggtggcgcgtgccgaagccgcggcccggcagcagcaccacgcctgcctcatcggccagctggaacagcaattcgttcggctcgaccgagttcatcacccatttgacgaagtccggaccgatcgccttgccgcccagctgctcgatatcgagcagcgtgtagtagtccacggcattcgggtcgtcgctttccggcgcgatgccgatctcgcggtacagcgcggccttgcggctgcggatcagccgcttcatcgcgttcttgtagttgtccggcgtatccatcagcgagaacagcgagaacagcaccatctgcacctgctgcggggtcgacaggccggccgtgtggttcagcgccaccgtgcggctgtcggccaccaggcggtcgatgaacttgagcttctgcggctcggtggtgatcgagctgtagcgctggttcagctgctggcgttgcacgtcgggcagcttgccgatctgcaggtcgaagatattgtcgcggtgcgtggcgatcacgcccaggcgccagccggtcgcgccgaagtacttggagaacgagtacaccaggatggtgttcttcgggcacatcgcgaacagcgagacgaagttgtcggcaaaggtgccgtagacgtcgtcggtcaggatgatcaggtccgggcgctccttgacgatcgaggccaggtactccaggctttcgtcgctcatgcgcactgagggcgggttgctcgggttgaccaggaagaaggccttgaccttggggtcgcgcagcttgtcgagctccttcttcgaatactgccagtgcgactcgggatcggcattgaccgacacttccaccagctggtagtcgttcagttccgggatctcgatatacggcgtgaagatcggcatgcccagcgcgatggtgtcgccggccgtgagcaggtggttctcgcgaatggagttgaacaggtaggtcatcgccgcggtgccgccttcaaccgcgaacagatcgaaatcgccgatgaacggatggtcgccgatcatttccttgcggatgtactggccgaccacgacctcagacagcttcagcatgcggtccggcaccgggtagttgcaggccaggatgccttcgcacatttcatagaggaaatcacccgcgctcaggccgagctggtcgcgcacatacgacaccgctccggcgaggaacttcacccccggggtgtcggcaaactcgcgcgcaaacaggttgaagcgttcctcgatgccttcgcggcgtgggaaaccgcccacgccctcgggcatgtaggagaacgagcgctcggactcgcgcatggcaaacaggcccagttgccagaagccgtggcgcggcacggtggcgaggaagttgggattgccgcggccggcgttcagcatcaggcgttccgcgtcgctgctggccagcttgatcagctcgtccttcagctcgaagggggagaggctggacagcttggagatatcgaacttgctcatggcttgctcctgtgtggacgcttgtcggtagggctggcgggccggtggagagggaatgcccgcgcagcaggagggatatcgaaggaaacgcgcgctagacgagcccgaccaccagtggtcccagcagcgtcagcagcacgttggccagggcataggtgatggcgaacggcaccgtcggcaccgggctttcggccttgtccaggatgccgccgaaggccgggttggcgctgcgcgagcctgacagcgcgccagccagcacggcggcgttgtcgtacttcagcacgtagcggccgaacagcatggtcaggaacagcggcagcagcgtcaccaccgcgcccagcaggaagatggtcaggccgctctggcgcagcgtggtcaccgcctgcaggccggagttgatgccgacgatggccacgaacgcggccaggccgaagtccttcagcagctggcaggccgcggtcggcatcgctccgtacatcttgtgcttggaccgcgcccagccaaacaccaggcccgacagcagcgcgccgccgccggcgccgagcgtcagcgggatcgcacccacgcgccacaccagcaggccgatcagcaggcccaccagcacgccggcgccgaagtagacgaagtccgtcttctcgctgggcaccagctcatagccggcgatctcggcggcacgcttggtgtcggcgggggtgccgtagagcgtgatgatgtcgccgtgctgcagcttgaggtcgggcagcagcggcagcggatggtcgaagcgctcgatacgctcgatgtacacgccgtggcgcacgtcgcggccgaccgtgtcgacgatctcggccacggtcatgttgttcatgcccttggccgtgaacaccaggttgcgcgactgcatcaccacgcccatgccctcggcatcggccacttcctcgccgatttgcgcggcagtcggcaccatggcatcgcgccggcccaccagcagcaccaggtcgtcggcctgcagcaccaggtcctgcttgacgtccagcggcttgccgccacgctgcaccttttccacggtgaccaggtcctcgccgccgatctcgatctgcaacacggtcttgccggccgcgcccgtcacgcggaagatccggcccaccaggcgcggcagggcgccgcgctggcccggcccgtactgcggcaggccgccgctgagctgggcttcgatcttcttggcgtcggtcttcaggtccgacttcatgaagcgcggcaggatattcacgcacacgatgatcgcgcccagcgagccgaacacataggtcacggcatagccgatcgccacattggcctgcagcgtcttgacctggtcgggcggcaagcccagcttggtgatggcatcacccgcagtgccgatgatcgccgactgggtcatgccgccggcggccaggccagcggccaggcccttgtcgaggtggaacagcctggccagcaccaccaccgtgaccaggccgcacaccgccatgaacaccgccatggcgatctcgcgcagcgagctgcggttcagcgagttgaagaactgcggaccgctttcatagcccaccgcgtagatgaacaccgcgaacatcacggccttgacgccgttgtcgatctcgacgccgacctggctgatcaccaccgcggcgagcagcgagccagccacgccgcctagctggaagcgcccgaaggtgatcttgccgatggcgtagccgaccgacagcgcaaggaacagcgccgattcgggcgacttctggaaaatctcatgcaaccattccatcgaaggctcctgaagcgagtgatgcgggttgggtgagtcgttgcatcggattgcgggggtgcgggaaattcagggcaggacggggcagcgcaggactgcgggtgcggggcgagcggaggcggggcatgtccatggcgcgggggcgtgtccttcgggcatgaaggtgatcatggcgatcacggcaatcacggtggcggcgcgcacaccgcagctggcaggtgcagcgttggcgccgcggatcgcgcatgcagtggcgcgaccgcatcaaccgcgttaatgcagcgtgaggcattatctccgccggtttccggccagcgtagtgaaagcttttgtcggcgaattaagcgcagtcaacgcgccgcgggcatggccgcgcgagtgtggaaacgatgtcgggagcggtgcgcgagggaagtgaagcggggcagtcgggagggaggtgccgcctcacccgaacgggtgcggcggcaagggcaaatgcgccgctgtcagcgcccgccggccaggcgggcttcgatatgcttggcgcgctccagcgatcccgggtgcgagctgagcatgctcgactgtccgccatcgagggtcgacatcttgcggaacgccgatgccagggcctggcggttggcgccgtttttggtcagcaggtcgaacgaatagtcgtcggccgcggtttcctgccgctgcgagaactgcgcattgacgaactgctcggcgagcgcgccgatctgcgacgacgatagcgccgtcagcgaagccacgccagtcgaccccagcagcccgcgcgccgcagccgtggtgtaggccacctgcatcgcggccttggtatggcccagcgacacatggccgatttcatggcccaccacgccacgcacttcatcgtcgctgagcaagtccatcaggccgctgtagacccgcacgcaaccgttggccatggcccaggcattgacgtccttggtcacatacaccttggcattgagtggcagcccggtgttgcccagcccgctcatcacattggccaggcgcttggcgtaggtgctgtccgccggtgcgatggtgttcttctggtccatttccgcgcaggactggtcggacagcatcttgacgttgctgtccgacagcgtcgcggcggtaaagaggctgccgccggcctgcgtcaggctttccatattggcgccggcacagccggccagcagcgcggaacaggcgagggcggaaagggcgagtcgcttcatggttcgctccgggaaagggggttggcaatgccataggataggtagccgggcgagggcgcgccagtgggcgccgtccgacaggcgctcaggcaaagtggctggcggggcacgtccgaggccaggaggcgtgcgccgacccgcggccgagatggcaccacggaggcaatgctgggaactagtcgggaagaagccgatggtgcccggggtcggactcgaaccgacacgccttgcggcgggggattttgagtcccctgcgtctacctgtttcaccacccgggcagggtgtatggcgccggaaccggcaccgtgctgagccgggaattatgccggaaatcccgtcgtcggacaaccagtgcgcggctgcgcaaatccggtagcatggcgcccagcctctcactcgcccatcgtcccgaccacccccgactgccatgaccgaccaagcttcgctggcgcgcctcgccagcctgccttcgcaggaccccggcttctatgaccgggaatacaacaaccgcgccaatgtgccggacaacgccgtgcatatggcgcgctgggcgcagtggtccgccggggtgcgcgcacgcggcgcttatctggcggacctgagctatgccggcgaggactcgcgccatgcgcaggacgagacgctggactacttccccgcgcagcgggccaacggggcgctgccgccgctgctggtcttcgtgcacggcggctactaccgggcgctggacaagcacgaccacagctttgttgccagcgcgctgccggcgctgggggtgtcggtggcggtggtgaactacacgctggtgcctgcggtgacggtgccggagatcgtgcggcaggtgttgcacagcgtcgcctggctgtaccggcaggcggaccggctgggccatgatccggacaagctcttcctggccgggcattccgtcggcggccacctggtggcgatgctgatggccgcgcgctggccgcagctgggcgcggagctgccggccgacctggtcaagggcgggctctcggtcagcgggctgtacgacatggagccgctgcggcgcgctgccttcctgcagcgcgacctgcggttctcggaagacgatgtcgcgcggctgtcgcccgcgtacatgccgccggccagcggtgccccgctggcgatcgcggtgggggaactcgaggccgccgaataccaccgccagcacgcgctgatccgcgcggcgtggccggccaaggtggcgcatccggccgcaagcgacctggtgctgccggactgccatcacttcaacgtgctggacggctttgccagcccggacggtgccctgacgcgcgcggtgctgcggctgatggagcgctgagcgcgcaccgggcgcgagggcgtcagccctccagcacgcgcagcagcgacgaggtgtcgtccttgccccagccgttggccatcagcgtgcgcagctgcgccgaggtggcctgcatcgcgggcaggtccaggccgatttcttcggcgatatcgcgcgccagcccgaagtccttgtcgtgcagccgcgcctcgatgccggcggcaaagttgcgcgccaccatcttggggcccatcaggtcgagcatgcggctgccggccatgccggtcgccatggcttcgaacacgcggccggtgtcgacgttctgcgcggcggcaaaacgcatggcctcggcaatgccttcgatattgaccacctgcgcgatctggttgcacagcttggcaacctggcccgcgccgtggtcgccgatatgggtgatggtcttgcccagctgctgcagcagcgggcgtacgcgctcgagcatctcgggcttgccgccgaccatgatggtcagcgtgcccgcctcggcgcccatggtgccgcccgagaccgggcagtccagcgcctcgatgccgcgcgcggccagcgccgcggcgatctcgcgcgtgacgatcggcgagatggtgctgtggtccacgcagatggtgcccggcgcggcgccgtggatcacgccctgctcgcccagcagcacttcgcgcacgtcttcggacgaggtcacgttggtgaagacgacgctggcgccgcgcgccgcttcagccggagtgaagaagggctccgcccccagcgcgcgcgcggcctcggccgcttccgggcgacgcacgaaggcgcgcacggtgtggccggcggccagcaggtggcggaccatgtgcgagcccatggcgcccaggccgatgaaggcgacggtggtgggggtgagagtggtgctcatgccatgcttcctttcttgatgcggcgggctacttatcgcccgcataggcgaacttgccgttgcggatcacccccatcacgcgcgaacgctggtcgaagccctggtggtccttcgggttcaggttcatcacgccgttggggatggtgaggttggtggtggcttccagcgcgtcgcgcatggcggcgcggaagtcgcgcgtgccgggctgggcgccggtcttcagcgcgcggcgggcggcgtcgtccagcagcatccacgcgccccaggcgtcgccggcaaactgcgtgacgctgtcggcgccgtacttgctttcgtagcggttgacgaagtccagcgccaccttgcgcaccgggtggctctcgggcagctggcgcgcgaccaccaccggcccggtcgggaacagcgtgccttccacatccttgccgcccatgcgcaggaagtcccaggtggcgatgccgtgggtctggtagaccttgcccttgtagccgcgctcgcccagcgtcttctgcggcagtacggacggcgtgccggcgccggcgatcaggatcgcgtccgggtttgccgccatcagcttgagcacctgcccggtcaccgaggtgtcgttgcgcgagaagcgctcgttggcgaccaccttgatcttgcgcacctcggccagcttcgagaactcgcgccaccagctctcgccgtaggcgtcggcaaagccgataaagccgacggtcctgacgccgtggttgctcatgtactcggtcagcacggtcgccatgtgcgagtcgttctgcggcatcttgaaggcccagcggcgcttggcgtcggtctgcggctcgacgatggaggccgaggcggccagtgccaccatcggggtttcgccctcggccacggcgtcgagcgcggcgatggcggtaggggtgatgttggggccgacgatcacgtcgaccttttcctcggagatcagcttgcgcacgttgcgcaccgccgcggccgggtcggtgccgtcgtcaaggatgacgtagtgcgccttctggccgcccagggtctggggccacatcaacacggtgttcttggaggggatgccgatcgaggccgccggaccggtggtggacacatcgatgccgacacggatgtcggcatgcgcggcggcgctggtgaagagcagggcgccggccagcagcagggggcgcaggggcattgtcagcatggtctcctccgttcttatatgtgacgggaaggatagccgaactcggccgccggggcacgcctgcgccccgccgcggccgtgccggtcagcgcacgcccaggcgccagagcgtggtcacctcggcggaacgcgccgcgtgcagcgggtcggcagcatccgtcgcgcgcgggtggcgcgggcggatatcggaacggcccagcaccttcagcccggcggcgtcgatccagcccatcagttcctcgcgcgggcgcaggccgagatgctcggccaggtccgacagcagcagccagccttcgccgcccggcgccagatgctcggccagcccctgcaggaagccgcgcagcatggcgctgtcagggtcgtagaccgcgcgctcgaccggcgagctgggccgggccggcacccagggcgggttgcacaccaccagcggcgcccggccttcggggaacaggtcggcctgcacgatttcgacctccccggcgtagccaagctgcgcgatgttctcgcgcgcgcaggccagcgcgcgcgggtcctggtcagtggcgaccacgcgctgcacgccgcggcgggccagcaccgcggccagcacgccggtgccggtgccgatatcgaaggcgagggtcttggccggcagcggctcggtcgcgaccaggtcgacatactcgccgcgcaccggcgagaacacgccgtaccaggggtggatgcggtcttccagcgccgggatctccacgcccttcttgcgccattcataggcgccgatcatgcccagcaactcgcgcatcgacgccacgtagggctcgctggccgggccgtagacctgttcgcaggcgtcgcgcacatccggcgcgcggcgcagcggcacctcgtggctggcctcgaacggcagcagcagcatgcccagcgtgcgggcgcgctgcgactgggccagccggtgcaggttgaaggcctcgattggcgaagcggccccgcccttggccttgtccctggctttctggccggggcggctggccttcttgggcttgcgctcggtgcggcgggccagcgcgtgcagcagctggcgcgcgttctggaagtcgccgcgccacagcagcgcggtgccctcgcaggccaggcggtaggcggtgtcggcgctggtggtgtcgtcggcgatgatcacgcggcgcggcggcggcaggccggcttcagagcgccaggcggcgctgcgctcgatgccgtcctcggtccagtgaatgcggggcaggtcgctcacagggcctccggccggcagggcgtgatgggcagcagatgcatggttgggtttgctttttatatagggagaggcggcgggccgtcctcagagttcgtaggcttcgtgttcgccggacatggcctgctcaaccagcttgcggttgagcgtcggcgagaacagctcgatgaaggtgtagacaaagctgcgcaggtaggcaccctgcttgacggccaggtgcgtcacgttgctgccaaacaggtggccggccgagatgccgcgcaggttgcggtcgcgctcggcatcataggcgacgccggcgacgatgcccacgcccagcccgatctccacgtacgtcttgatcacgtccgcgtcgatggcctccagcacgatgtccggctccaggtggcgcagcgcgaaggccttgtcgatcttggtccggccggcaaagttggcatcgtaggtgatcagcgggtagcccatcaggtcttccagcgccaggtgcttcttgtccagcagcggatgctcgggtggcgtaatcaccatatgggtccactggtagcccggcagcgacacgaggttcttgtcggcggagatgccttcggtcgcgatgccgatatcggcctggtcgtgcagcagcatgtcggcgatctgcgccgggttgccctgctggatcgacagccgcaccttggggtagcgcttggtgaactcgctgatcacccgcggcagggcgtagcgcgcctgggtgtgggtggtggcgatggtgaagttgccctgatcctgtgccgcatagtccataccgacgcgcttcaggctttccacctcctgcaggatcttctcgaccgagctcaggatgcggcggccgggctcggtcaggctgcggatgcgcttgccgtggcgggtaaagatatctacgcccagctcttcttccagctcgatgatggccttggacacgccgggttgtgacgtgtagagcgctttggcggcctcagtcaggttgtagttctgccggacggcctcacgcacgaagcgaaactggtgcaggttcatatatctgggttcgtataaacaaacaacttcttattagtttgaggtatgaggccagtttattacgattctcgaactttgttaattaatggccagccctcagtgcgtcctctcgcagcagccactttgtgatgcgagacccacgggccaggttcccaccgagtcccccatgtctgttgcctatacggtttccggtctgtttgtaggcgtcctcgtcggtctgaccggggtgggtgggggctcgttgatgacgccgctgctgacgttgctgttcggcttttcgccggccaccgcggttggcaccgacctggccttcgccgccatcaccaagggcttcggcaccatcgcgcaccgtgcccacggccatgtgcagtggcaggtggtgcggcgcctgtgcatcggcagcctgccggcggctgtggccgccatcctggtgctgaagagcgccggcgagctcaacgcccagtggctgcacgcgatccgcctgaccatcggcgtgtcggtgctgctgaccgtattgtcgctgctgttccgcaagcagatgctggcctggctggaacgcaatccgcgcttccagctgcacggccgcgcccaggtcattgccaccatcgtggtcggcgccgtgatcggcgtgctggtgacggtgtcgtcgatcggcgccggcgcggttggcgccacgctgatcctgctgctgtatccccatatgaagccggctgaagtggccggcaccgacattgcctacgccgtcccgctgacggcgcttgccgggctgggccatgtatggctcggcacggtcgactggaatttgctgctggcgctgctggtgggttcgatccccggcatctggctgggcgcgcaactgtcgcgggcgctgcccgaacggctggtgcgtgccgcactggcgaccacgctgacgctggtcgccatcaagctcgtttcctgaattcaacgaatactgaacggaccccgccatgtatcagtacgaccaatatgaccagcgcatcgtcgccgagcgcgtcgcccagttccgtgaccaggtgcgccgccgcctgtccgacgagctgaccgaggaagaattcctgccgctgcgcctgcagaacggcctgtacatgcagcgccatgcctacatgctgcgcgtggcgattccgtacggcctgctgtcgtcgaagcagatgcgcaagctgggccatatcgcgcgcgagtacgaccgcggctatggccacttctccacgcgccagaacatccagtacaactggatggagctggagcgcgtgcccgacgtgctggccgagctggccagcgtcgagatgcacgccatccagacctcgggcaactgcgtgcgcaacatcaccaccgaccacttcgccggcgtcgcgccggacgagtcggtggacccgcgcgtgctggccgagctgctgcgccagtggagcaccttccagccggagttcgccttcctgccgcgcaagttcaagatcgccatctcggcctcggccaatgaccgcgccgtggtgcagatgcacgatatcggcatctacgcctacaagaacgccgaaggcgaaacgcgcctgcgcatcctggccggcggcggcctgggccgcacgccgatcctgggcacgatcatcaaggacgacctgccgtggcagcacatgctgtcctacgtcgagtcggccatccgcgtgtacaaccgctatggccgccgcgacaacaagtacaaggcgcgcatcaagatcctggtgaaggccatcggcgcagagaagttcgcgcaggaagtcgaggaagagtggcagcacagcaaggacggcccggccacgctgacgcaggccgagttcgaccgcgtggcgcagtatttcacgccgcccgcctatgaaaagctggccgacaccgatgcttcgtacgagaaccacctgctggaagacaaggcctttgcgcgctgggtcagtcgcaacgtgcacggccacaaggtgccgggctacgccgcggtgacgctgtcgaccaagccgggcgtggcctcgcccccgggggacgccaccgacgcgcagatcgaagccgtggccgacctggctgaccagttcggcttcggcgagctgcgcgtcgcgcacgagcagaacctgatcctgccggacgtgaagaagcaggacctgtacgcgctctggcaactggccaggaaggccggcctggctaccccgaacatcggcctgctgaccgacatcatcgcctgcccgggcggcgatttctgctcgctggccaacgccaagtcgatccccatcgcgcaggcgatccaggaccgcttcgacgacctcgactacgtctatgacctgggcgagatctcgctgaacatctcgggctgcatcaacgcctgcggccaccaccacgtcggcaatatcggcgtgctgggcgtcgacaaggacggttcggagtggtaccaggtcacgctgggcggcgcccagggcaaccagaccgcgctgggcaaggtgatcggcccgtcgttcagcgccgaggaaatgcccgaggtggtgacccgcatcatcgacaccttcgttgccaaccgcatcgaggacgaacgctttatcgaaaccctgtcccgcatcggcatcgccccgttcaaggagcgcgtttatgccgacaagcagccgcgcgagcgcgctgaagcctgaggaccggagactgaacatggcaaagatcattcaactgcaacaggatggcgctaccgtcgcccccgtcatcgtcgatgacggctggaccgtgctgcgcggcaccgccgagcagccgctgaccgacgagcagatcgcagcggccgtgcaaagccaggacgcggtgctgttcccgctgtcggtgttcaaggccaacgaagcgctgctggccggccgcgacgcggcccgcaccggcgtgtggctggccccggaagacgagccgggcgatgccgaggcgtatttcgcgcgcgtggcgctggtggcggtggacttcccggtgttccgcgacggccgcggcttttccacggcctacctgctgcgcacccgctaccactggaagggccagctgcgcgccatcggcgacgtgctgcgcgaccagctcaacttcatgaagcgctgcggcttcgatgccttcgcggtgcgcgccgacaagaacatcgaggacgccatcaagggcttcaccgagttcaccgtgacctaccaggcttcggtggatgagccgctgccgctgttccgccgcgcgcgggcagaggttggcgcgcaaccgaaggaaacggcatgagcacggtgctgagcgaaatcgccgtggtcgacgccggtgcggcgtcggcgatgcgtccgcctgcgctgtgggttgcgccggaatacaccggcagcattgccgcgctggagcagaaggagcgcgagctgggcgagcgcctggcgggcatcgccggccgcttcttccgcgcgcgctttgcctcgagcctggcggccgaggacatggtgctgaccgacgcgatcctgcgcggcaccgaagccgtgcgcgccggcatccgcgtgttcacgctgcagaccgggcgcctgcacgccgagacgctggcggtgctggacaaggtgcaggcgcactacggctacagcatcgagcagttcacgccggacgccgaggccgtcgagaactacctgaagaagcacgggctcaacgccttctacgacagcgtcgagctgcgcaaggaatgctgcggcatccgcaaggtcgagccgctcaaccgcgcgctctcgcacgccgacgcctggctgaccggccagcgccgcgagcaggcggtcacgcgcgccgagctgccgttcgaggaacaggacgaagcccgcggcatccccaagttcaatccgctggcggactggagcgagcccgaagtgtgggcctacctgaagcgccacaacgtgcccgtcaacgacctgcatgccaagggctaccccagcatcggctgcgagccgtgtacgcgtgccgtgcgcgcgggcgaggatgtgcgcgcgggacgttggtggtgggagagcaaggactcgaaagagtgcgggctccacgaacagaacatcaagcattgaggccggacaaaatgggcatcatgaacgacatcgcagaagccaccagcagcgtggcgcacctgttgcaagtacagaacgatcacctcgaccgcctcgaagcggagtcgatctacatcatccgcgaggtggtggccgagtgccgcaacccggcgctgctgttctcgggcggcaaggactcgatcgtgatgctgcacctggcgctgaaggccttccgcctgggcgagcgcaagatcgagctgccgttcccgctggtgcatatcgacaccggccacaactatccggaagtgatcgccttccgcgaccagcgcgtggctgagctgggcgcgcgcctggtggtgggccatgtcgaggactcgatcaagcgcggcaccgtgcgcctgcgcaaggaaaccgattcgcgcaacgcggcccaggccgtgacgctgctggaaaccatcggcgagcatcagttcgacgcgctgatgggcggcgcccgccgcgacgaagagaaggcccgcgccaaggagcgcatcttctcgttccgcgacgagttcggccagtgggaccccaaggcccagcgccccgagctgtggagcctgtacaacgcacgcatggcgcagggcgagcagatgcgcgtgttcccgatctcgaactggaccgagctggacgtgtggcagtacatcgcccgcgagaagctggcgctgccgccgatctactattcgcaccagcgcgaagtggtgcgcaagaacggcctgctggtgccggtcacgccgatcacgcccaagcaggacggcgacgtcagcgaagtgttgtcggtgcgcttccgtaccgtcggcgacatcagctgcacctgcccggtggccagcgttgccgattcgccggaagcgatcatcgccgagaccgcggtgaccgagatcaccgagcgcggcgctacccgcatggacgaccagacgagcgaagcctcgatggaacgccgcaagaaggaaggctacttctaagccgcacgcagcaaaggatccagacatgactcaccaagcaacccatcaaggcctgctgcgcttcatcaccgccggctccgtcgacgacggcaagagcacgctgatcggccgcctgctgtacgacagcaaagccgtgctgtccgaccagctgaccgcgctggccaacgccaagaacaagcgcaccgccggcgagcagatcgacttctcgctgctgaccgacggcctcgaggccgagcgcgagcagggcatcaccatcgacgtggcctaccgctacttctcgaccgcgcgccgcaagttcatcatcgcggataccccgggccacgagcagtacacccgcaacatggtcaccggcgcctcgaccgcggacgcggccatcgtgctggtcgatgccacccgcgtcaccgtcaccgacggccgtgccgagctgctggcgcagaccaagcgccactcggcgatcctgaagctgctggagatccggcacgtgatcgttgccgtcaacaagatggacctggtcgactacagcgaacagcgcttcaacgagatccgcaccgcctacaccgaactggccgagcagctgggcctcaaggacgtgcgctacgtgccggtgtcggcgctgcgcggcgacaacatcgtgcatgagagcgatgccatggcctggtaccagggcgagccgctgctgccgctgctggaagaactgccggtggaagaggccgcacccgaggatgacgccgcgctgcgcttcccggtgcagctggtgatccgccaggacggttcgcagtcggacgacttccgcggctatgccggccgcatcgaagccggcaccgtgcgcgtgggccagaagctgcgcgtgctgccggccaaccgcgaagccgtggtggctgaagtgctgacgcccaatggtgccgctgaatcggccaacgtcggcgataccgtcacggtgcgcctggccgaggacgtcgatgtatcacgcggtgatatgttcgttgccgccgatgcgaccacggcttcggcaaagaagctgcaggccgacctgtgctggttcgacgacgaatcgctgaacccggcgcgcaagtacgtgctcaagcacaccacggccagcgtgttcgcgcgcgtgtcggcggtggaccgcgtgctggacgtgcatacgctgtcgcacgagaccggtcgccacgatatccgcctgaacgacatcggttcggtgcagatctcgctgcagaagccgatcgtgtgcgatgcctacggcgacaacccggcaacgggcgccttcgtgctgatcgacgaagcgaccaaccacacggtggccgcaggcatgatccgtgcgttctcctgatcggtaacggcaggaaaggggcagcagatggacaagcaggcgcagaagacttacggcaaggtgttcctcatcggggcaggccccggtgcggcagacctcattacggtgcgcggtgcacggcttttgggcgaagcccaggtggtgctgcatgatgcactggtagcgccggagatgctggcctggtgtccgcaggccgagctggtcgaggtgggcaagcgctgcgggcagcgctccaccgcgcagctgttcatcaaccgccagatcgtcgacctggccggcaagtacgagcgcgtggtgcgcctgaagggcggcgacccgatgctgttcggccgtgccgacgaggagctgcaggcgctggaagccgctggcatcgagtatgaagtggtgccgggcatcactgcggcgctggcggctgcttcggcgatcggcaagccgctgaccaagcgcggtgtgtcgcgcagcgtggcgtttgccacgcaggcgaaggctgcggatggcgagggctcggccgatatcgaagcggcggtcaaggccgatacgctggtctactacatgggccgcgaccaggcggcgtcgattgccgcgcagctgatcgcgcatggcaagccggcgttgacgccggcgtgggtggtggaagccgccagcacgccgcggcagcgtagccgtgaattcacgctgggccgaatggcagcaggcgaggccgctgcctggatcgatccggtgcagccgagcctgctgatgatcggggcggcgctggctgcgcgggctaccgaaacgccgcgcgaaggcgtgggtgaaaccgtcgtgcagacgccgcgcgctgcctgagcgcgctgcgcgccactagaaaaaagccctgtaccggcatgccggcacagggcttttttcatcggggaccacatttctgctcagggctggccgcttgcgggcattgaggcaacgcagtatgcggccattgcatccagcaccgcatcggcctcgcctgccgccgtcgcgcaatggatgcgcagcccgggatgcgcttgccggcattggtcgagcaaggctggcaggtcgcgccgcaggtggccgccctggcccaggaacaccggcaccacggtggcgtcggacacgccgcgcgctgccaggtcggcgagcgcgtcgggcagagcgggcgtcatcagctccaggaacgccagctgcacctcgcacccgggcagggcagcggccaccttctgctgcaggcggtcgaacggctcgcgccagcgcgcgtcgcgcgcgccatgcgcaaacaggaccagggcccgggtgggtgcggtcatggcagcccgcccctcagtgccggtccacccagcgcagcgccagcagcgccaccatcaggtagagcgtacctggcaccagtgccgagatgatcggcggccaggtatgcagcaggccgacgtgcgagaacagcgtgttcgacaagtggaacgacaaccccagcatgatgcccccgaacactttcacgccgacggcgccggcacgggcgtgcaggtaggcgaagggcagggccagcgccatcatcacgaacagcgtcagcgggtagatcaccttcttccagaaggcgatctcatagcgctgcgtgtcctgcttgttgtcgcgcaggtggcggatatagcggaacaggtccagcgtcgacatccgctcaggcgtcaccagcagcactgacaggatttgcggcgtcagctcggaatgcatggtcacgcgcgggaacttgacttgctcggcgcggaaatccggggccagcgaatcgcgtgccggcttcgcgccctgggccggggacgccagttcgatgaagcgggtctcgttgacgccctgcagctcccacaactggccaccctggtagcgcccctcctgcgccacgcggatcatgcgcaggcggtattgcgggtcgaactcatacatggtgatgccggtgatggtctggtccggccgcaaccccgccacgttgacgaagcgggtgatctcgccgccgccggtggcggcatccttgtcgcggtccttgacccagacgccggaacggaagcccgacgacacggttgcgccgatcgcctcgagcttgatcttctgcgcgtactgctcggcgcggggggcgatgaactcgccgaagataaaggtcacgatggccagcggcaccgccagcttgaacagcgagaacagcgcctggcgcgtgttcaggccggccacgcggaagatggtgtactcggactggctggccagctgcgagaacacatagatcgcgctgatcagcaccgcgatcggcagcacctcatacacccgcgtgggtgcctgcagcaggacgtggaacagcgccaccagcgaggtgtactggttgttgacattctccagctcgttgagcatgtcaaagaacacgaacagcgacagcaccgcgaacaggatgaaggcgaacacgccatagaccagccggccgaagtagcgttcatagacgcgcaggatcttcatgcccggcctccggtggccgcggcatcacgcctgcgcaggccgaacacggcgcgccacccgcccaggctgcggttctggcggtagcggaacagcagcagcgcccccaggaacaccgccaggtggatcggccaccacgccagccagaacgggatcgcgcccgagcgcacccaggactgcgtcaggttgatcaggttgctgtaggtcaggtagatcagcaccgcgaacaccagcggcgtgtagcggcccaggcgcgggttaacgtaggccagcgggattgcgatcatgacgaagttgaaggccaggatcggcagcgagatgcgccagatcagctcgcccaggttttcgcgcgtggggttgcggatcagctcgatggtgtcgcggctcttgggtggcagcttggcttcggactcgggagccttgttgtccaccttgaccgcgtagcgttcgaactcgacgatgcggtagtcgatctggccgggcatgcccgagtagcggcggccgttttccatcaccaccaggcggtcgccgttgggcatggtctcgaacttgacctggtgcgccagcgccacgccgatcttgtcggcctcggagttggcgacgaagacattgcgcgcatgcttcatgtcggcgtcgatgccctcgatgaacagcacatagttggccttggcgggctcgataaagcgcccggcggcgatcatcgacatcacgccgcgctgctcgaagcggtcgcggaacagcgcgctctgctggttggcccagggccaggcgaacatgcccagcagcagcgccagcacgatgaagggtgccgcaaactgcagcaccggcttgaccagttcgcgcagcgagatgcccgccgagaaccacaccaccatctccgaatccttgtaccagcgcgtcagcacgatcagggtggagatgaagagcgtggccgacagcaggatcgacaggtagccgatggtggccaggccgatcagcatcagcacgtcgttgggactggccttgccgctggcagccattcccaggatgcggatcacgagcgaggtgagcatgaaggtcagcatcaccaggaacaccgccccggcggtgtaggcaagctcgcgtcgcagggcttgttgaaggatcatgcgggttcggttccgggctgccggccggagcgggcgatgtgccgtgcgaggtgcctggcagaacagctggctggcagcacagcatgctgtcagcgtgaccggggcgtatcagcggcggcaggtcgcgggataaaaatcgcggataatggaggctttcgtgtctaacgagcccctggaaggaagcgcgatggaatttagcacaaaagccttggattggagcaaagccggccaaaatggtttcctggcgaccaagaccgactgcctggtggtcggcctgttcgaaggccagaacctggccggagtagccaaggcactggacgtggccaccaagggcctggtggggcggctggtcaagcagggcgacttcgaaggcaagcgcggcacccagctgatgctgcatgaggtggccggcgtgggcgccgcgcgcgtgctgctggtgggcctgggcaaggaagccgatttcagcgacaaggcctttgccgacgcggtccgcaccgccgtgcgtgccttgtcgtccacgcgtgcggcctcggccctgtggtgcctggcgcaacaggcgccgcagcagcgcgatgtcgcctgggcggtgatcaccaccatcacgctggtgcgcgaagccggctatcggctgctggagcgccatccgggcctgaagcgcgccaatgccaacggcaagcccaacggcaacgacaagtcctcgctgcgcaaggtcgtgatcgcggtcgacaccggcaatgcccgcgccgccacccaggccgtggtgcgcggcaccgccatcgccaacggcatggagctgacgcgcgacctgggcaacctgccgtccaatatctgcacgccgacctacctggccaataccgcccgcggcattgccaagcgccacaagctcaaggccgaggtgctgggccgcaagcagatcgaggccctgaacatgggggccttcctggccgtgaccaagggcagcgaagagccgccgcagttcatcgtgctgcgctacgacggcgccggcgccaagcaggccccggtggtgctggtgggcaagggcatcaccttcgataccggcggcatctcgctcaagccgggcgagggcatggacgagatgaagtacgacatgtgcggcgccgcctcggtgctgggcacgatccaggccgtggccgagatgggcctgaagctcaacgtcatcgccgtggtgccgacctgcgagaacatgcccagcggcatcgccaccaagccgggcgacgtggtcaccagcatgtccggccagaccatcgagatcctgaacaccgacgccgaaggccgcctgatcctgtgcgacgcgctgacctatgtggagcgcttcaagccggccgcggtgatcgacgtggccacgctgacgggcgcctgcatcatcgcgctcggccacatcaacagcggcctgtacgcgcgctccgacgcgcttgccgatgccctgctgcaggccggccgccgcgccatggacaccgcctggcgcatgccgctggacgacgagtaccaggaccagctcaagtccaactttgccgacatgggcaatatcggcggccgcccggccggcagcgtgacggcggcgtgcttcctctcgcgctttaccgagaaatacgactgggcccacctggacatcgccggcaccgcctggaagagcggcgcggccaagggggccaccggccgcccggtgccgctgctggcgcagttcctgatggaccgcgcggcctgatggcggcggcaggcaacagaggcagcaagggtccatgacgcgcatcgatttccacagcaacgtgccggacgtgctcggctatgtctgccggctggtccgcaaggcctacggcgccgggcagaaggtggtgatccacggggcgccggcgcagctggcggacctggatgcgcgcctgtggaccttctccgcgctggatttcctgccccattgcgggctggaaagccccaatgcggcggtcacgccgatcctgctggccgccaccaccgaaggcgtgccgcaccaccagctgctgatcaacctggcagaccaggccccggcgcagtttgccagcttcgaacggctgatcgaggtagtgggcgcgggcgatgccgcgcgcgaagccggccgccagcgctaccgtttctaccgcgaacgcggctatccgctgacgcaccacgacatcggccagcccaagggagacgccgcatgagcgaacgcaccacctcgcgggtgatcccgcggctcgatccgaatgacagcatcccgctgctgaccgaggtgttcgaactgccggacgcagggacagcagcgccggctgccgctgcgcaggagggcgtgatcgataccttcggcatggccgattcgggcctggtcatgcatgtcggcgataccggcgacgccgtggcggacgaaggcgccgcgccggcatcggcgatgccggcagatagcggcgccccgggcgaggacgacctgcgcgccgtgcgcaccgagttgctgacgcgcgtgatgatgcgcttccgcaccgaatggccgcaggtcgtggcggcccataccgaagccacgctgcagtcgcgcctggcgccgctgacggcgcaactggccagcgagctgacccagtcgctggaggcgcggctggtggaatggctggatgcgacgctggaggagatcgagaagacgccgggggaggattaacggcggctgaagggctggagcggaccggcgggtctcgacagacgtcggcaaacaaaaaagcctgcgatcgctcgcaggcttttttattgagcaggacgaagatcagtccgtcactgcccccttgctcgccgtcgacgccagcttcgagaacttcgccagcactccacgggtataacgcggcgccggctgcttccagttggcccggcgcctggccagttcttcatccgccacgttcagctgcagcaacagcttgtgcgcatcgatggtgatcgaatcgccttcctgcaccagtgcgatcgtgccgcccacatacgcttccggcgccacgtggccaaccaccatgccccaggtaccaccagagaagcggccgtcggtaataaagccgaccgattcgcccagccccttgccgatgatggccgaggtcggggccagcatttccggcatgccggggccgcccttggggccgaggtagcgcagcaccaggatgtcgccggcgttgatcttgtcggccaggatggcttccatcgcgctctgctcgtcctcgaacacgcgcgccgggccggtgatgaccgggttcttcaggccggtgatcttggcgaccgcgccttcttcggccaggttgcccttcaggatggccagatggccttcggcgtagagcgccttttcgatcggcaggatcacgtcctggtcggcacgcggggtgtcgggaacgttttccagctcttcagccagcgtgcggccggtgatggtcaggcagtcgccatgcagcatgccggccttgagcaggatcttcatgacctgcgggatgccgcctgccttgtgcaggtcggtcgccacgtactggcccgagggcttcaggttgcagatcaccggcaccttgcggcggatgcgctcgaagtcgtcgatggtccattccacctcggcggcgtgggcgatggccaggtagtgcagcacggcgttggtcgagccgcccgtggccatgatcagcgccacggcgttctcgatcgacttgcgcgtgataatgtcgcgcggcttgatgtcctgcttgatcgcctcgaccagcacgcgcgccgattcggcggcgctgtcgaccttttcctggtcggggttggccatggtcgacgagtacagcagcgacatgcccagcgcctcgaacgacgagctcatggtgttggcggtgtacatgccgccgcacgagccggtcgacgggcaggcgttcttttccacgccctcgaagtcttcctggctcatgcgcccggcggtgaattcgcccacggcctcgaacgacgacacgatggtcaggtccttgcccttccagttgcccggcttgatggtgccgccgtagacgtagatgcccggcacgttggtgcgcgccagcgcgatcatgccgcccggcatgttcttgtcgcagccgccgatcacgaccacgccgtccatccactggccctgcgcggcagtctcgatgcagtcggcgatgacttcacgcgagatcagcgagtacttcatgccctcggtgcccatcgacatgccgtccgagatggtcggggtgccgaacacctgcgggttggcgtccgaggccttgatcgcgtcgatggccgcatcggccaggcgctgcaggccagcgttgcaaggggtgatggtcgagtggccgttggcgatgcccaccatcggcttgtcgaagtcttccttcttgtagccgagggcgtagtacatcgaacggttgggcgaacgcgccacgccttgcgtgatgttctgcgagcgtttgttgaatgccatggtggggaatctccggggatcttcagtgccgctccgcgctgcgcccgaagacctggaggcacgaacgcacggcggcgatgttgtgggccaaagaatgacccttgcgttttggagtgtcaaatatattatttgacctttattgagtcgaaaaacatatcaggagggcgtttggacctgcggcagttgcgttactttgtcactgtggcggaagagttgcatttcggccgcgcggcagggcgcctgtcgatgacgcagccgcccttgtcgcagcagatccaggcgctggaagaggaaatcggcgtgcagctgttcgtgcgcacgcggcgatcggtggcgctgacgccggccggccagcagtggctgcccgaggtgcggcgcgtgctggccgatgccgcggcgctgcccgggctggcgcagcggctggcgcgcggcgaggtggggtcgctgtcgctggcctttgtcagcaccgccgactacggcatcctgcccgacctgctgcggcgcttccgcgcgcgccacccggaggtgcagctgcaactgcgcgaggccaccagcgacgtgcagctcgaggcgttgatggagggggcgatcgacgccggcctggtgatccggccgcagctgccggccatgccgcacgggctggcctacctgccgctggtgagcgagccgctggtgctggccgtgcccgacggctggcggccggcgggcgcggtgctggcgggcgacgccgcggtgtcgctgcgcgaggccgcccatgaaccgctgatcatcttcccgcgccgaagcgcgccggcgttttatgacatcattacgggctactatgcgcgcgagggcctggtgcccgtgatcgcgcaggaagccatccagatgcagaccatcgtcagcctggtatcggcgggcatgggcgtggcgctggtgccggcctcgctgtgcaaccttcgccgcaccggggtgtcctacctggcgctgcgcgaggccggcccgcagatcgagaccgggctggtctggcgcgacggcgcgtccgccggtgtggcgccggtgctgcgctcgttcatcgatattgcgaccgcgctcgcgcaagaagcaggcgcagccgggcccgcccctcgctgacacgtcaccaatgtcaccgaggccactgacaatacgcaggccgcggcctttacaacctccattcacgccaacatgctgattcatccccagttcgacccggttgccatccacctgggcccgcttgccatccgctggtacgggctgatgtacctggccgggttcatcatgttcctgggcttcgggcgcctgcgcatccgccagccgcatatcgcggccaagggctggaccacgcgcgacctggacgacatgctgttcttcggcgtgctgggcgtgatcctgggagggcggctgggctatgtgctgttctacaagccgtcgtactacctggcccatccgctcgagatcctcaaggtgtgggaaggcggcatggccttccatggcggcttcctgggcgtggtcgtggcgatgtggctgttcggcaaactgcgccggcgccactggatggaggtgaccgacttcatcgcgccgatgatcccctgcgggctggccgccggccgcatcggcaacttcatcaacggcgagctgtggggccgcgccaccgacctgccgtggggcatgatcttcccgcaggcgggcgacaacatcccgcgccatccgtcgcagctgtaccagtttgccggcgagggcgtggcgctgttcatcgtcctgtggctgttcgcgcgcaagccgcggccgatgggcgcggtgtcgggggtattcctgatcggctatggcgccttccgctttgccgcggaattcgcgcgcgagcccgacaacttcctgggcctgctggcgctaaagctgtcgatgggccagtggctgagcctgccgatgatcctggccggcatcgccatggtggtctgggcctaccggcgccagcccggcgccggcgcatcacagccggtggcctgagaacccgtcggcgcgctatttgccggcgcggcgcaaggcgtcgatgcgcgcctgcgtttgcgggtgggtcgacatgaagtcctggccgcgttccggctcggcgtccgacgccgccccgcgccgattgtccagcctgaccagcacctcggccagcgccgcgggcggcaggccgttgcgctgcatgacctcgatcgcaaaggcgtcggcctcgcgctcgtggtcgcgtgaatagcgcagcgtcaggatcgcggccggcaccccggccagcaccgtcgagatatccccgaacaggtaggccgacagcgccgccagcgccgacccctgaatcacctgctgcatgccgtgccggttggcgacatggccggcttcatgggccagcacgcccatcatgccggcaccggtgccggccaggctcaccagttcgtcggtgaccacgatggtgccgcccggcagcgccagcgcattggcgccgatctcgccgccctggcggaacaggatctggtagtcgtggccggcatcgcgcgggcgcttcagcgccgcgaaggccgagcggatgcgttgctgctcggcgggcggcagctgcgtcggcttgaccatgccgttgtccaggctcgccagcgtcagcttgccgagatgggcctccacctcgggcggcaccgtgcgcgccatgatgccggcgccccatggcagcagcacgtaatagcccagcaccagcaccgccaccagccccgccacggccaggccggccaggcgccagctgttctgcgcgcgcgccaccaggctgtcgcgatggccggtggcggccagcaggtggtcgaaggcggcgtggtcggtgatctcgcagaaggcgccgtcggcaaaggtgaccagccgcggcgcgcggcgcacgcgctcggacacgcgcacgtccgacagcggcgcgcgccgcagctcggcgccggagtcgtcgcgcagcacggcctgctgcgcctcaacggccagcgtggccggatgcgcgcgcgacgagcggccatcgaagaaggtgactgggatcatggtgcgggccgggtcagcgcacggcgtgttcagagcgcgatgtcgatgtcgtaccagtctaccgccgcatcgcccagcgcacccacttgctgcgcctcgccggccacgaaggtgtcgagcgggcccgccgccagcatggtcacgcattcgagccggtagcgcgccgaacgcacccgcgcgaacggcaggtacaggcccagcgtcagcgcgatcgcgatcaggttggtgacgaagataaagaccatgcggccggcccccacctcgctgcggaacgcatgcggcgccagcgtggtgtggctccacacgacattctgcaagcgtgccatcacgtaagggctgacggccagcagcgccaggtagaaaccggtcacgccgatgccgaacgacaacatcatgcccgcctggcccgacgcggtcgcgcccagcatgaagccggccagtgccgcggccgccaccagcgcgaccatcacgccgaaggcacgcaggtagacgccgtagaaatcgcccgcgccggcatggaaggcaaacggcgcggtgccgaagcgggtgtggttgtgctggtagcgcttgaagcgctggtgcgccagcggccccagcaggcccagcgtggccactgcggccagcggccacagcacgaacaccttgtaggcatcggcatcgccgccggtaaaggcgaagcgcaggccgcggtagctggagttggccatgcggaaacgcaacgagcgcaccagcagcagggggaacaccgccagcagcgccaccagcatcgccagcgcaaggaagggcgagaccgtggaggcgaactggaaggcgagcaccagcgcgaacacgatggcgcggcccttcaggatcgcggacggcttgccgtggtagtcaaaactcgcaccgtcgagccgcgtgttgcgatagaaatactgcaacgtgcgcaccttggcccaggccgaatagatgccgaaggtgacgatggtcagcagtgcattgacgatccagatacggaagtattccgaacctgatccggtaaaggacaggcccagcgcccgcggcacggcgtagcgcggctcggcaggcgccggtgtctcgtctgccggggtgccggccagggtgaaatcgctgccagcttgcatggcggagctccagtgtgtgtggaaagcgacagtaaggattgcggcctcgaccgcagtttcaggaatgcaaccacttcagttcgggcacttgcggcgatgcgctcacattctcgcactgataaatagcgaccacggcacaatctgcatatgccattgccgccaggcgggcaggcgtataagaaaatgtgggaaaaccctcgtaacaatctagaaacatcctgttacactagacgtattctgtaacaacttctgaatgcgtgttgccaatgaaatcatggggttagtcccgctggcacgtaaatcgctatcttgattgttacaaagatgagcggcaagccacagccgccaacggaagtgccagggagggagtgaaggccgacaggccgcacttgccggcacttcacgtaaagccagggcgacgggaaaatccgcgcaacaagcgcgtttcaaaaaggggggcgcagggccagcgccggcaatccatggacccacgcggcagatatttttgcaagtatccgccgacgatgaaaagcagtactgcagtaattttcaggcgcgggtgtttccttgcagggaggcatggaaacgcccgccgcacctcataccgcaccccgcgccgcatcctcacagaccgcacctgccggtcgaccaccagccaccatcgctactgcttgttgcagagcagcatcgaaattccttgtatcgttcgcaccctaatccataattatgaattatggctggccgggcgcatctgccctggccgacgccagatcgtgaccgggacgcatcggtcacgcgatccgacccgggggaagtatgcgcatcgtccagcaggcgttgtacctggaagtggcagaccggctgcgcgccatgatcgacgcgcatacgctcgtgcccggcgcatggatcgacgagagcgcgatggccgaaacgcttggcatctcgcgcacgccgctgcgcgaagcgctcaaggtgctggccgccgaaggcctggtgcggctggagccgcggcgcggctgcttcgtcaatgagctgtccgagcaggacctggacgagatcttcccgctgatggcactgctggaagggcgctgtgcctacgaggcggcgcgcaacgccacgcgcgccgacctggacgcactggacggcctgcatgccgacctggcgcgctatgcgcaggcgggcgacatcgacgcctactacgaaaccaacttccagatccacgaatcgatccagcggctggccggcaaccgctggctgtcgggcctgatcagcgacctgcgcaaggtgctgcggctgtcgcgccacaagagcctgaagctgccgggccggatccaggaatcctgcgccgagcacctgtccgtgtttgccgcgctcaaggcccgcgacccggaaggcgccgaggcgatgatgaagacccacctgctgcgccagcgcgcggcgctcaagacgctggatgccggcgccaccgccggcgcagccgaggcccaggccgtgcgcgcgccgccggtgctgcgcgtagccggcgccgaagagtagccggcgccgcaaccccagtccgacgtttttcccacgttcagatcgatgcatcaaggcaggtaccgcatgaattccttcgacacgggtgaccagaagatcagtgcgccgctgggcgaaagcgagccggcaggttccaagttcctgtcgcggctgggccgctggtggggacgcaagggcgagggcgacaccaaggccccggcaacgccggtcgatggcgaggcgccgctggcggcgcgcgcggtgcgccgccagcgcgagcagctgcggctttgcttcgacgcgcgcctgaccgatggcgccgccaatgccgccgcgcaggcatggcaggccgagtatgaggctgctggcgaggccacccggcgcggcatgctggcggtgctggccgaagtcgccagcagcggcggcaagggcagcgaagaggccggggccgacggcgacaagggcgcgcgcgccgcccgcgcgcaggccgcgtcttcgggcctggcccaggccctgtccaatgcgcgcatccgcttcttcaagcggctggccgcgctgcacggccagcgcggcaacagcgcctgcggcctgcacttcctgatccagctgcgcgccgacatgctgcgctggcagcgccgcatgccagggctgcgcccgcttgacgacgatctcgaggcgctgttctccaactggttcgacgtgggcctgctggagctgcagccgatcacctgggattcgccggcatcgctgctggaaaagctgatccgctacgaggccgtgcatgaaatcgcctcatggaccgacctgcgcaaccgcctcgattccgaccgccgctgctttgcgttcttccacccgcgcatcccgcgcgagccgctgatctttgtcgaggtggcattcgcgccggagatggcggccaatgtccatacattgctggatgaagccgcgccgctggaagacctgcgccgcgtcaagtgggccatcttctattcgatcagcaatacgcaggcgggcctgcgcggcgtgagcttcggcaactttctgctcaagcgcgtgatcgaggaggtccagcgtgaattcccaaaagtgaatcagttcgccacgctctcaccaatccccggatttgccgactggctgcgcaagcaggacggcgatgccgttgcgcgcgtgctgggcgacaagcgcctggcgcgctggagcgagcgccacggcaaggcgccagcggacggcgccgggtggctggaggcgctggtgccggacgccgccgataccgtgatccgcgataccgcgatgaccctggccgcgcatttcctggtgcgcgagcgcaaccagtcgatgcccgccgacccggtcgcgcgcttccacctgggcaacggggcatgcgtggagcggctgaactggggcgccgacctgtcgcgcaaaggccgcagccagagctgcgggatgatggtcaattatctttacgtgcccgaggcgctggatgacaatctggcacgcttgggcgccggcaacccgcgcatcagccgtagcgtcgggaagctgctgtgaccctggtccggtcacgcgggtcgcccccgcacccgcggcgcctggcgcgccgcgttttcttgtcgggacctgagcagtaacttcgcgccgcggcagtgtcgcgcggccatcagattgactttccgcagaagagagaggagacaaccaatgaatcgtcgtcagttcagcctggccgcgtgcgcgcgcgcaacgggcgtggccctgggcctggccggcctgggcgccggcgcaatgctcgccgcacccgccgcgcatgccgacacctggccgtccaagcccgtcaccgtgatcgtgccgtttcccgccggcggcggcaccgacgcctttgcgcggccgctgaccgcgcagttgtccaagcagctcggcaagcagttcgtgatcgacaaccgcggcggcgccggcggcacggtcggcgccagcattgcggccaaggccgcgccggacggctacacggtgttcatcggcggcgcgcaccacgcgattgcgccgtcgttctacaagaagctggactacgacatcgagaaggacttcatcccggtcacggtgatcgcgcagccgccgcaagtggtggtggtcaatcccaaccgcgtcaaggccaacacgctgcaggagctgattgcctacgccaaggccaatcctggcaagctgaactacggttcggccggcaacggctcgtcgcaccacctggcgggcgagctgttcaagctccagaccaagaccttcatcacccacatcccctacaagggtgcgggcccggcgctgtccgacctgatcgcgggccaggtcgacctgatgttcgacggcctgggctcgtcggcgcagcatatccgcgcgggccgcatcaaggcgctggcggtggcttcgagcaaacgctcggcggcgttccccaacgtgccgaccgcggccgaggcgggcgtgcccaactatgacgtgtcgacctggtatgcgatgtgggtgcccaagggtacgcccaaggagatcgtcgaccgcctgtacgcagagaccgagaaggcgctgaacacgtcggagctcaagcaggtctggcttaacaacggttccgagacgccggcgtttacgcaggaacagttcgcgcagttccagcacgccgagattcgccgctgggcccaggtggtgcagcagtccggcgccaagatcgactgacggggcgccatgtcaacgctgatccgatgcaagggggcgcggcgatgagcggcaccgtattgtttgccacgcagggcaccaccgccaccgtgacgctgtcgcacgcgggcaagctcaacgccatttccgctcagatgtggcgcgagctggccgcgggctttgcacgcctgtccgccgatacctcgctgcgctgcgtggtggtgcgcggggctgacggcaactttgccgccggcgccgacatcgccgagttcccggcagagcgcgccgacgaggccgcggtgcgccactaccacatggccaccatcgcgccggcactggcggcggtggcgcaatgcacacaccccaccgtggcgatgattgaaggcgtatgcgtgggcggcgggctggaaatcgccagccactgcgacctgcgcatcgccgcctcggacagccgcttcggcgtgcccatcaaccgcctgggcttcccgatggcgcccggcgagctgcagggcctgctggcgctggcgggccgcgccgccgcgctggagatcctgctggaaggccgggtcttcgacgccgccgaggcgcgcgacaaagggctgctgacgcgcgtggtcgagcccggcgcgctggccgcggaggtcgaggccacggcgcgccgcattgccgccggcgcgcccgtggccgcccgcatcaacaaggccaccatccgccggctggcgccgctgccggcaccgctgtcgcccgccgagctggacgcgcattttgcctacgccgaaggcgcggaccatgcggaaggggtggccgccttcctcgcgcaccggccaccgcagttccgtggggagtagggcacgctgccagcactgcttccacacgccattgttttcttcgttttccttagcctttcgttcgatccccgacatgaacgccaacctgttcgccctgttcgaatcccgcttccccgccgaccgcaccgcctgctgcatcgagacgcatgacgggctgtattacagctgggacgaccttgaccgcgccaccgccaagctggccaacctgctggcctcgctgcacctgcccgaaggcgcacgcgtggcggtgcaggtggagaagtcccccgaagcgctgttcctgtacctggccacgctgcgcgccggctacgtctacctgccgctgaacaccgcctaccaggaggcagagatcgactacttcgtcggcaatgccgagccgtcggtggtggtgtgcagcagcaagaatttcggctgggtgtccaaggtggcgttccgccacggcgtcaaccacgtctttacgctggacgacgaccgcagcggctcgctgctgtcgcgcgcggcgggcaagccagatgccttcgagacggtcgcgcgccaggatgacgaccttgccgccattctctacacctccggcaccaccggccgcagcaagggcgcgatgctgacgcaccgcaacctggcctccaatgcgcagacgctgcatgaattctggggctggcgcagcgacgacgtgctgctgcacatgctgccgatcttccacgtgcacggcctgttcgtggcttcgcacggcgcgctgctggccggtgccaagatgatctgggcgcccaggctggacatggcgcaggtgctgaaattcctgccgcgctgcacggtgatgatgggcgtgccgacctactacgtgcgcatgctgcaggagccgcgcttcgacgacgacacctgccgccgcatgcggctgttcgtgtcgggctcggcgccgctgctgctggagaccttcgatgccttccgcgagcgcaccggccataccatcctggaacgctacggcatgagcgagaccgtgatgctggtgtccaacccgtacgatgccgcgctgggcgagcgcatcggcggcaccgtcggcatgccgctgccgggcgtgtcggtgcgcgtggtcgatggcgagggccagccgtgcacgccgggcgagatcggcaatgtcgaggtcaagggtccgaacgtattcaagggctactggcgcatgccggagaagaccagggaagagttcaccgaggacggctggttcaagaccggcgacgtcggccgcttcggcggcgccattgccagccaggccggcgagcgcgcggtgccggacaactacctgaccatcgtcgggcgcagcaaggacctgatcatctcgggcggctacaacgtctacccgaaggaaatcgagagctttatcgacgagatgccgggcgtggccgagagcgccgtgatcggcgtgccgcacgcggatttcggcgaggccgtggtggcggtggtggtgcgcaagccgggtgcggatatcgatgaagcggcgctgatcggcacgctcaagggccgcatcgccaacttcaaggtgcccaagcgtgtgcacgtggtggacgagctgccgcgcaacaccatgggcaaggtgcagaagaacgtgctgcgcgagcagttcgcggtgctctgagcgccgtgatgggcagcgccctgcgcgatggcgcagggcgctgctgtcttacttcagcatctgcaccgacccgttgaccgacaccgtcacctgcgtcttgccgccctcaaccggcaccggtaccgcagcgtcggccatcatggccttggcagcgccgtacatgcgcggcatcggcggcaccacgccggtttcattcaggctgacttcgcggatggtgtagctgttgtagccgaacagtttggtggtcaactgcgccttgctgcggaacgaggcgatggcctgctcggccagcttggcttcggccgcctcgcgcgcttcgcgcgacagcgagaaggcgatgttctgcacctgcatctggctggccagctcgccagcgagcttggacacggccgagaaatcgcgcgacttcaggatgacttcggaccgcccgcgccaggtgctgatgcggccgttgcggtcggtgttggggtggatggtgaagccgcccgactcggcggtcacgccctggacgcggcgcgcctgcgtgatgacggcctgcgtcctggtagacaggcccgaggaaatcgcggccggttcagcgccttcctgctccgcggcaagcgtcaggtgcacgatatcggtcggcacttcggtgacggcctgcgcgttcagcgacagcacgcccgacggcgtttcagtggggccaccgtgcgccgaggcaacgatggcggtggtgcccagcagggtggcggctagccattgtttcatgttgttctcccgttcaaacgtgatgggtatcagacgtgaccgggtgcccgatcgttccgcgacattgcaaacgattgttgcgaagccggcgcgggcgcgcctcccccgtccgggtcagaatgcctgccaggccttccacaacatatagctcgccaggcacagcagcaacgcggcaaagaccttgcgcaactggctcacatccatgcggtgcgcggtgcgcgcgcccagcggcgcggtcattacgctggccgctgcgatcaccagcagggccggcaggtagagatagccgagcgatcccgccggcagccccggcgtctgccagccgctccagacatagccggccacgctggccgctgcaatcggaaagccgagcgcagccgaggtcgccaccgcgttgtggatcggcacgttgcaccacgtcatgaacggcaccgagacaaaggcgccgcccgcgccaaccaggctggacaggaagccgatcacgccgcccgcgcccgccatgccggcaaagccgggcagctgccggccgggcttgggacgacggttgcgcagcatctgcagcgcggaaaacccgacgaaggcggcaaacgccagcgacagccagctggtcttgagcgccgcgaacaccttgccgccgccgatcatgccgccgagcacgatgcccggcgccagcgccagcacgatcggccagcgcaccgcgccgcgctggtggtgcgcgcgcacggacgacaacgaggtgaacaggatggtgcccatcgaggtggcgatcgccatatggacgatggcctcgtcggcaaagcccaggctggtgaacagcagcgtcaggaagggcaccatcatcatgccgccgccgacgccgagcagcccggcgcagaagccggtgaaagcgcccagggcaagcagggcagggaccagcaccggcaggttgtcgaactgcatcgtatcttcagggttgttgtgatcagccttgcccggggccggccgggcagggttcagcgcatcagcttgccggtgatgaagcgccattcggccggtgtcaccggcgtgatcgacagccggttgccgcgacgtagcaccaccatgtcggccagttcctcatgctcgcgcaaggcggccagcgggatcagcgcgctcttgcgctcgaagcgcacgtcgaccagcagccagcgcggcgcgtcagccttggaggcggcgtcatagtacgggctcttgcggtcgaactgggtggggtcggggtagggtactgagcagacctcggccaggccggcaatgccgggctccgggcacgacgagtggtagaacagcacgccgtcgccgatccgcatggtgtcgcgcatgaagttgcgcgcctggtagttgcgcacgccggtccagggcagcgtgccttcccgggccaggtcgtcgatgctggcttcatccggttctgatttcatcagccagtactggcgggcgcgttggttctggttcgggctcacggcgcagctcaggaatcgaagcagatcagggcgccgcgtgcacagggtgtgcacgcggacgcgcaggcaagaaaaaaggcgatggttcagaaaaccaccgcctttttaaggggtccccgccttggccgctgggtcggcatcctgaacccaagtgaggttcagagtggctgcggaagtcgcatttcgggtacatcatccactcagggagtccaggccaggcccagactatgaatgcgacgacgcgctcgcccacgcgacatgatcccgcaccatgcaatgcatatcggttcaaggagtttatgaccctcacgaaccaggcagggaaactgtcaaacgtctgactttccaggcgcatcatcgtgcccggaaaaccggatccgcgtgcgggatgtcagacgtttgccgtttctgactaggatgggatgagaacggcggccgggcgcgataacctagcctgtagctgcacatctatggtgcctcgtgcagtctggctacactatacaccgcgttgcagggcataccaagtccactcgcgcgtatcgttacattttgcgcggcagcgcggcatccgcagcacatccccctttcattgctcagccgcgcgtaccggtgcccacgtgcgcgtattggcgcagggcctcgtcggcgcggtcgttgagttcgcggatgcgcgcgcggatggcatcgaccgggatcgcgccctcggcctgctgcttgcgctgcatcgacagcaggtccgaggcgatgctgatggcggccatgaccgccacgcgctccacgcccttggccgcgatgccgttgcgcagcttgttcatttgcgtgtcgaccagggccacggcttcgagcagcgcggcctcgttctcgggcgcgatggcgaagcggtagggctggccggcgatattgacttcgacttgcttgttgctcatgcgtgttctccgggggccttgtgcggctcggcgtcctgcgccgcagcctcttcgccgagcaggtcgagctggcgcgtgtcgctggcagtcggcagcttgtcaaggatggactggatgcgcagctgcgcttcctcgatcttgatattgagcagttcgcggtcggctgccatggcctcgcgctcgccgcgcaactgcgcggcttcgccctccagccgggcgatctcgtcgcgcagccgctggttctccgccgccagggtgtccgcatggtgcagcacgcgcccgatcttggcggccagttgttcgagttcggtgagcatagggcctgtcatgatgggagaagtgtcaggtatcgcgattctagccgatgcgccggcttgcacaatgcggaggaaagggtttgtgactggcgacccgcgtggaagttgcaggcttctgcacctaaaacgccaccagagttgtgacaaaacactactggcagccgcgttgacgcggggggcgaaacgccctagactcgcgcacgttccaggtgctcgcccttttcgtccctggcgaaagggcagttcaacgggaaacagggagccaggccggctgcgcgccggacaggccaacctgtgctgcccccgcaacggtaagcgaccgcggtgcgcatctgccagactccgacatagccgacagccagcctgccggcaacgccgctggcaaggccggatcccattcccggccacacgcaccgcaggaccggccacacgccactgaaccgcaggttcgggaaggcgccggcccagtgtcgccagcccggataccggcctgaacgcgggctgccgcccgtgcgcggcacgcctcatcgccatatggtccgcgggggaacgggcccggccgttcctatccagtcctgcatcatgcgttcatcgctccataggtcgacccgcccggcaaccccggcggtgcgtccgtccgtgcccgccatcctggcggccattgcctcgttcaccctggttccggccacttcgttcgcgcaggcggccgacagcggcaccgacagccgcaccacgcagctcgcgccggtggtggtcacctccacccgtaccgcgcaagccattaccgaggcgctgcctcacaccacggtggtgacgcagcaggacatcgtcaattcgcaggcgcccgacctgcgcacgctgctgcgcaaccaggccggcgtggagttctcggccaacggcggcatgggcaccaacaccacgctgttcatgcgcggcgccaactccaaccagacgctgatcctgatcgacggcgtgcgggtatcgtccgcgagcagcggcaccgcgcaattggccaatatcctgcccgaccagatcgagcgcatcgaggtggtgcgcggcaatgtgtcggcgctgtacggctcggacgccatcggcggcgtggtgcagatattcaccaagagcggcgcgggccaggcgccggcggccaatgcgcaggtggaatacggcagcaacaacacgcgccagggcacggtcggctatggcggccagatcggcgatacctcgttcaacctgaccggctcggcgttcaagaccgacggcttctcgtcgatcaacacgaagcaggcgccgcgcgccaatcccaacgacaacccgtacgagaaccagagcgtgtcgggccaggtcaagcaccgcttcgcgccgaactgggacgcgggcttcaccggctattactcgaagagcaagctgtcgttcgacagtgccttcggccgcccgaccgacgacaaccgcaccaacagcgagctgtacacgctgtcggccttcgtcaacggcaaggtgggggcggactggtccacccatttcaagctgtcacagagcgaggaccgcagcgacaccttcctcaatggcaggcccaacggcactttcaatacccgcaaccgccagttcaactggcagaacgagtatgcgctggccgccaaccacacgctgctgttcggcaccgactacctgcagcaggagctcgactccagcgcctacggcgcgcccacgcgcaatgtgttctcggtgttcggcggctatgacgggcgcatcggcaagcaccagctgcagctcaacgcgcgcaacgaccattattccgacttcggcaaccagggcagcttccgcgccggctacggctactacgtgaccgatgcgctcaagctgatcgccagcgtcagcaatgccttccgcgcgccaaccttcaacgagctgtacttccccaacttcggccagccgaacctgcagcccgaacgtgccaagtcggtcgaggccggcgtgcagtacgccaccgccagcgccggcctgctgcgcgtgaccgccttcgagacgcgctacgacgacctgatcgtgtcggcgcagcagcccagcggcatgttcctggcgcagaacgtcaacaaggccaaggtgcagggcatcgaggcttcgtggcgcgccaccgtgtatggcaccgacttcggcgccagcgtgaccttccagaacccggtcgacgagcagaccaacacccagctgctgcgccgagcgcgccgccatgccgcgctcgacgtgggccgcgacttcggcaactggcgcttcggcggcgaatggctggtgtcgtcgtcgcgcatggattccggctcgcgccggctgggcggatacggtatcgtcaacctgaacgcccgctacaacatcgacaagcaatggttcatcgccgcccgcgtcgaaaacctgttcgacaaggattaccagctcgcctacccctacaacacgcaggggcgcgcgggcttcatcacgctgggctggcgccagcgatgagcgcacgggcgcgccatgtctgagttccggcgcgccctggcgatctggctggtgctggcgctcgcggcgctgctggcgttcgcgttgtcgctggcgctgggcagcgtgccgctcgatgcgcgcgagctctggcttgcgctcagcagtgccgacaccggcacccccgcagcgatcgtgcgcgaactgcggctgccgcgcgcggcagcggcgtttgcctgcggcgggctgctggccctgtccggcgcgctgatgcaggtgctgctgcgtaacccgctggccgagccctatgtgctgggcgtgtcgggcggcgcctccactgccgcgctgctggccatgctgctgctggccccgtggtggggcgttcaggccgccgccgccgccggtgcactggcggcgatggtgctggtggcgtcgctggcgcggcgcgacctgctgcatccgcaggtgcagggcggccaccgcgaggcgggcgcccggctgttgctgaccggcgtgatcctggccgcgggctggggcgcggtcattaccctgatcctctccattgcgccggagtcgcgcctgcgcggcatgctgttctggctgaccggcgacctgggcggcaccgccgcctacggcggcgcgctggccatgctggtggtggcgctgctgctggccatgccgatggcgcgcgcgctcaacgtgatgctgctgggcgagaccgtggcgcagtcgctgggcgtgcgcgtgggccgcgtgcggctggccaccttcctgctggcgtcgctgtgcattgccgctgccattaccacggccggctcgatcggttttgtcgggctggtggtgccgcatctggtgcgcctcgcctggggcaacgaccagcgcctgctgctgccggccgccacactgctgggcggcgcgctgctgatggccgccgacctgatcgcacgcaccgtggtcgcgcccgcgcagctgccggtgggcgtgatcaccgggctgctgggcgtgccgaccttcctctacctgctgctgcggaggccgcgatgagcctggccccgcactggtcccatccgctcactgcctgtccgcagatcgtgctgcgcgatgtgaagctgcgcaccggccagcgcgtgctggtggagcgcctgacgatgaccatcggcgcggggcagctatggtgcattgccgggcccaacggtgctggcaagtccacgctgatgacggtgctggccgggctgcgccacgccgacggcggcagcgcggagatcgacggcgccgcggcggcgcagatcgcgccggcggtgctggcgcgccagcgcgcctacctgccgcaggccgtgcatgacaccttctcgatgtcggtgcaggatgccgtgcgcgtggggcggcatccgcacctgtccggctggggctggaccgggcgcgaggatgaccgcatcgtgcaggaagtgatccgagcgatggatattgaagcgctggccgcgcgcgatgtgctgaccctgtccggcggcgagcgccagcgcgcctcgctggccgcggcgctggcacagcaggcgccgctgctgctgctggacgaaccggtctcgcacctggacctgcgccaccagatcctggtgctggaacagctggccgcgctggcccgggccgggcgccatgccatcgtggtgatcctgcacgacctgacgctggcgctgcgctacgccacccacgccctgctgatggccgaagacggcactacgctgcatggcactgccgcccgggtgctgacccctgaacactgctcgcgcgcgctgcgcaccgccatcgtcagcgtcaccgacggcgcgcatactgcgctgattcccgacgggcgccgccccacccataccccacacacgtcatgactgatacccagaacccgcctgcagaagacccggaccgcgatgcccgccacaaggcgcgcatggagcgcaagaaagaaatcgtcgacgccaggattgccgccgcgcaggatgagcgcggcgtgattgtcatcaccaccggcaacggcaaaggcaagtccagctcgggctttggcatggtggtgcgcgcgcttggccacggcatgcgcaccggcgtggtccagttcatcaagggcgcgcagcccaccggcgaagagatgttcctgcgccgcttcccggacgagtgcgccttccacgtgatgggcgagggctatacctgggaaacgcaggaccgcgcccgcgacgtggccaaggccgaggctgcctgggaagtggcgcgcggcatgctgcgcgaccccggcatcggcctggtgctgttcgatgagctgaacatcgcgctcaagctgcactatcttgatgtggagcaggtcattgccgacctgcgcgcgcgcccgccgatgcagcacgtggtcatcaccggccgtggcgcgccgccggcgctggtggagacggccgacaccgtcaccgacatgacgccggtcaagcatgccttccagcagggcatcaaggcgcagcgcggcgtcgagatgtagccgcatcgtttttgaatacaaggtcaacgcatcatgcagtttccggaaatcactcccctcgacgatgccctgcgccccgagctgcaggccgccatcgacgacaagaccaagccgctcggcgcactgggccggctggaatcgctggccttgcagctgggcctgatcctcggcacggcgcggccggtgttgcagcgcccgacggtgatcgtgtttgccgccgaccacggcgtggccgacgccggtgtcagcgcctatccggccgaggtcaccgcgcagatggtgcagaacttcctggccggcggcgcggcgatcaatgtgttctcgcgccagcacggcattgcgctggagatcgtcgacgcgggcgtgcgcgcgccgctgccggcggcaccgggcctggtcaactgccgcattgccgacggcacccgcaacttcgccgtcgaacccgcgatgacgccggagcaggccgccgcggcgatgaccgcgggcatggcgcgcgtgctgcgccatgcgcagcagggctgcaacgtgatcggcttcggcgagatgggcattgccaacacttcagcggccgcgtgcctgatgcagcggctgaccggcctgccgctggcagactgcatcgggcgcggcaccgggctggacgatgccggcctcgcgcgcaagcgcgaggtgctggagcgcgcgctggcgctgcatgccgatgcgcaggcgccgctggacgtgctggccaccttcggcggcttcgagatcgcgatgatggcaggcgccttcctggccgccgccgcgagccgcatggtgatcctggtcgatggctttatcgccacggctgcgctgctggtggcgcagcgcctggaccccaatgtgctgcagtactgcgtgttcacgcactgctcgcatgagcgcggccaccgtgcgctgctggaccagtttggcgccgcgccactgctggcgctggacctgcgcctgggcgagggcacgggcgccgcgctggcgtggccgttgctggcctcggcggcggcattcctgaacgaaatggcgaccttcagcggcgccggcgtcagcaccgcctcgccatgagcgtgccgtccgacccggtgcctgcacaagctggccccgccggcgtggccggcgagctgcgctatttcctgacggcgctgggctacttcacgcgcgtgccgctgccgggctggctggcgcgctgggccggattcgaaccgcattacctgcacgccgccgcgcgctacttcccgctggtcgggctgctggtgggcggcgtgggcgcgctggtcacctggggcgcgatgctgtggtggccgtccggcgtggccgtgctgctgggcatggccgccacgctgctgctgaccggggccttccatgaagacggcctggccgattgcgtcgatgccttcggcggcgcgtggcagcgcgaggacgtgctgcgcatcatgcatgactcgcgcatcggcgcgttcggtgcgatcgcgctggtggtggcgttgctgctcaagtggcagttgctggtggcgattgccgggcgcggcgggttgatggtgctgctggcggtgatcgtcgccgcgcatgccgccagccgcgcgatggcggtcagctatctggccacgctgacctacgtgcgcgcgcaaggcaaggccaagccggtggcgcagaagctggccggcgcggggctggcgttcgcgctgctgtgcgggctggtgccgctgtggctggtgtcgccgtggttctgcgcggcggcagtggtcgcgctgctggggctgcgcctgctgctcggccgctacttcgtgcgccgcatcggcggctataccggcgactgcctgggcatggcccagcagtgcgccgagatcctgctctacctggtggccgcggcatggatgtggtcctgatccgccatgcgcagccgcaggtgccggcgggcacctgctatggctgcctcgacctgccgctggtggcgccgctggcgcccgcagcggcgcggatcgccgcgggcctgcccacgcctgatcgcattgtcgccagcccgctggcgcgcgcgcttggcaccgcgcaggcgctggtgcaggcgctgccgggcggcgcgccggccatcgataccgaaccccggctgcgcgagatcgatttcggcagctgggagggcgtggcctgggatgccatcgaccgcgccgcgctcgaccagtgggcggccgacctgctgcacgcgcgcccgcatggcggcgaagcgccggcgcaggcgatggcgcgggttgccggctgggcgggaacgcttgccacggatggcgctgaatgtctctgggtggtcggccatgccggcccgatgcgcatgctggccgcgcactggctgggcgtgccgctggcgacgacggtcaactgggcgttgggcttcggggccagttgtggcttcacgctggggccgggagaggtccggctcggctggtggaaccgcgccgcctgatcagcgtgcgggccggcgcttgcgcgccgtttcgaggtccttgcagatcagctcggcgccttgcgccacgcgcggaccggcgcggttgaccaggtcgccgtcgatcacgaacaggttgttgcgcgccaccgccgtgacctgcttccagcgccgccacatctcgaaatccggcagcggctgatccgagcgcgtggcgcccatgcccgccgtcagcatcgcctccgggttgcccgcgatcaccgcttcgaccgacaccgtcggcaccagcggcgtctcggccgcgaacaggttgcgcccgccgcacagcgccagcatgtcgctgaccaggtgctggccgttgagcgtcatcagcggctgctgccagacctggtagaacaccgtcaccggcgggcgggccgcgtaagtcttgcgtagcgtctccacctgctggcggaagccgtcggcagcgcgccgcgcggtggcttcggtgcccagcagcgtgccgagcttctccatgttctccgggatcgcggccagcctgcgcggctcgctgtagaacaacgggatgccgagcgcgcgcagacggtcggtctgcctctgcgcattgccgtggcgccagaccacgatcaggtccggcttgagcgcggcgatgcgctccaggtccagcgccttgttgtcgcccacgcgcgcgatctcgcgcgcctgcggcgggtagtcgctgtagctgaccgtgccgacgatgcggtcgccgccgccggccgcgaagatcatctcggtgacgtgcggcgccagcgagatcacgcggcgcgcgggctgcggcagtgtcaccgtctggccagcgtcgtcgacggcagacaccgtggcggcggcaggcagggctgccagcagcagcgtggaagcgataacgggcgtcaggcggttcagcatggaatcggggaaagtggttcaggcagtgaccgcggccagtgccgcgtccagccgctgccaggcgtgcggctggtccggcggcaggcccaggcgcaggctcggcgggcagccgccggcggcgtcgaagcagcgggtccagacgccatgttgcgcgagcccgtgctgcagccgtgcggcgtcgccatgcggcacccagcagaacagcggatgcatcaccggcgccaggccatggcggtccagcagcgcggccagcttcgccccgcatgcttgcagccgcgcgcgggtggcatcctgccagccgtggtcggccagcgcatgccgcgcgacctcgcgtgccgggcccgatacggtccaatggcccaggcgctcgcgcagcgcgtccagcagtaccggctgcgccagcacgaagccgcagcggatgccggccaggccatagaacttgccgatcgagcgcagcaccaccaggccggccttgccgctgtgcgcggccaccgagccatcgggcaggcagtcgataaaggcttcatcgaccagcagcgtgccgccgcgcgccgccagcttcgcgtgccagcgcagcagcgttgcggcgggcagcatgcggccggtcgggttgttcgggttgacgacgacgagatggtcgagctcgtcggccagcgccgcctgcgcgaaagccgcttcatccagcggcgccaccgcatggcccgcggcagcgaaggccggcgcgtattcgctgtagccgagcgcggcgatgcccacgcggcccgggcgcagcagacccggcagcgtgcggatggcggcctgcgagccggcgacgggcaaggcccgcggcgcgccgcaggcctgcgcggccagctcggccagtccgtcgtcatcctgcggcagccgttgccacgcttgcgcaggcagcgccggcaccggatagccgtcgggattgatgccggtggacaggtcgagccagtcgccggcggggcggccgtagcggcgcaccgcggcaagcaggtcgccgccgtggcggatccggggcagggcgctgctcatgccggcgtggcaagcgcaaggacggccagcgcgctggcgcctgccagcgccagccacagccacaaggtgcgctcgaccagccgcaggcaggccgtcacgtgcgcggcttgcggcgcggggccggcgcccagcggcgggcgttgctcgatctcgccgtgatagcgcgccgggccgccgagtcgcacgcccaccgcaccggcgcccgcggccatcacggggccggcattgggacttgaccatgccggcgcctgcgtgcgccagcaatgcaacgcctgcgcggtggcgccgagcagcgcataggacagcgcggtcaggcgcgcgggcacgaggttgagcccgtcgtcgatgcgcgccgcggcccagccgaaatacagcagccgcggcgtacggtagccccacatcgcatcgagcgtattggccagccggaacacgatcacggcgggcgcgccgccgaccaggaaccagaacagcgcgccgaagaccgcgtcgttgccgttttccagcgccgactcgcaggcggcacgggccagtgcttcagcatcggcatcggtggtgtcgcgcgagacgatgcgcgcggtcagcgtgcgcgcggcgggcaggtccgccgcggcaagggcggcggcgatcggggcgatatgctggtgcaggctgcgcgcgccgagtgcggcgtacagtgccaccgcatgcagcgccagggcggcaacaggatgcaggccggccgcagcgtcgaccagccaccatgcgagcgttgccggcaccagcaccagcacacaccagccggcgagaccggcaaggcgctggcgccagggcgcaccgcggtgcggcgcagggttgagccgccgctcaaacgcggcagcgatgcggccgaagcccaccagcggatgccagcggcgcggctcgcccagccagaggtccagcagaacgcccgtcagtgccgctgccacgcatgccggccaggccagcatcagcatgtgggatcggcgcccttcaccgcaaccggaatgcctgccaccatcagccgcacgcagtcggcggcggcggccagcttctggttcaggcggcccagttcatcgacatagaagcgggtgatggcgcccatcgggatcacgccgaagccgatctcgttcgagaccaggatcacatggcccggcagcgtcggcagcgcggtgagcagcgcttcgatttcctcggtgaaggcatccggcggcgtgatcacgccatgttcgggatacgcgcggccgtcggggaagatcaggttgttcatccacagcgtcatgcaatccaccaggatgcagccgtcgtggcgcgcgttggcgtagagcgcatcggccaggtgcaccggctcttccaccaggcgccagtcggcggggcggcgggcgcggtgcagggcgatgcggacctcgagctcctggtcggcgtgcgccaggtcctggtgcgcggtggcgatgtaggtgaccgggccgccggtgatggtggcatggtcggtggcgagctgttcggcgtaatggctcttgccggaacgcgcgccgcccagcaccagggtgagctggcggttaccgtgtccgccggcggcacgcggctgggtggcggtgtcgggggcggaggcgggtgcgatggccggggtttccatccgcgtattgtagccgccgcatccgggcatcgcacggggggtgttgcaggcaccggtgcgataatccgccaatgcagaccgactcctcgcaatccctgccgccgggtgccctgcgcggcacgctgatggtccagggcacgacttccgatgccggcaagagcaccatcgtggccggcctgtgccgggtgctggcgcgtgccggcacgcacgtggtgccattcaagccgcaaaacatggcgctgaacagcgcggtcaccgccgacggcggcgagatcggccgcgcgcaggcgctgcaggcacaggccgcgcggctggcaccgcataccgacatgaacccggtgctgctcaagcccagcagcgacaccggcgcgcaggtgatcatccacggccgcgcacggctggacctggatgcgcgcgcctaccatgcctacaagcccgaggcgatgaaggccgtgctggcttcgcacacgcgcctggcgcaggcctataaggtggtgctggtggagggcgccggcagcccggccgaggtcaacctgcgcgagcgcgacatcgccaacatgggctttgccgagcgcgtcgactgcccggtggtgctggtggcggacatcgaccgcggtggcgtgtttgcgcacctggtcggcacgctcgactgcctgtccgagagcgaacgcgcgcgcgtgaccggcttcatcatcaaccgcttccgcggcgatgtcggcctgctggagccgggactggactggctggtggcgcgcaccggcaaaccggtattcggcgtgctgcccttcctgcacggcctgcatctcgatgccgaggacgccatcatcggcgcgcaagcggacaaggccggcacgccggcgcagcgcctgcgcgtgatcgtgccggtgctgccgcgcatcgccaaccataccgacttcgacgcgctgcgcgcgcacccgcaggtggacctgcagtttgtcgggcccggcatgccgatcccgcccgcggacctggtggtgctgcccggcagcaagaacgtgcgcggcgacctggacttcatccgcgccaatggctgggacgcggcgctggcccggcacctgcgctacggcggcaagctgatcgggatctgcggcggcatgcagatgctggggcggcaggtgcacgatcccgatggccgcgaaggcccggccggcagcagcgcggggctgggctggctggatttcgagaccacgctggcggcagagaagcagctgcgccaggtcggcggccggctggcgctggatcaggccgatgcgccggtgcgcggctatgagatccaccttggcgtcaccacgggcgcggggctggagcagccggccctgtggctcgagcgcggcgacggcacggtgcggcccgacggcgcgcgctcggccgacggccaggtgctggccacctatgtccacggcctgttcgacgagcccgccggctgccaggcgctgctgcgctgggcggggctggacggcgcccaggaggtggacctcgacgcattgcgcgaagcatcgatcgagcggcttgccgacaccatgaccgcgcacctggacctggatgcgatgctggcgccgctgcggcgctgacgcatgcggcacggccgcctggcggggcccctgctagaatcgcgaatctttcgcatttgcattctgcgtggaggtggcctgtgcgccatattccacgcatggcagcgtccgctcaacgtacttcagcccccacatggtcaccggccgcctgcgcgtcgccctcgtcaaactgcacctgtatatcggcctgagccttggcctgctgttcgtcctgttcgggctgaccggcatgaccattgcctggcgggaggaactggatgcctggctcaaccctgacctgctggtggcgtccgcgccgatgacggagccggtgtcgccggccacggtccaggcagtgaccgagcggctggctgcacccccctatggcaagcccaacctgctgatgctgcccgtccatgccgacggcgtctttatcgcctggtacccggtcaaggggcccgacggcgtggtgccgggccgctcgcgccaggtgatggtcgatccggtcacgcttgcggtgaagggcgagcgggtctggggcgaggcgggcctgtcgcgccgcctgttgctgcccacgctgtttcacctgcatcgctacctgctgtcaggcgacaccggcaagaccatcaccggcgtggccggcatgctgctgttgctgaccacgctggtgggcgtggcggtgtggtggcccaggatgaagctgcgctcggtggtgcaggcgttccgcatcacgcacggcggctcatggtcgcgcttcaactattcgctgcatcgcgccggcggcatcctggccgcgccggtgctggccatcatcgccttttcgggctggtacctgaacctgccgaagtgggtgacaccgatggtggcgggcgtgatgaccgtgacgccgccggtgaagcacgtctcggcaccggcgccggccggggcccggccgctgggcgcgggcgagatcatggcggcggcgcaggcccggtacccgcaagcgcaggtgacccgcatcagcttcccgcgcaagccgggcgatgcgttcgagatccggctgcgccagcccggcgaggtgcgcaaggataccggtgccacgcggctgtggctcgatgcctggagcggcaagccgctgggcatgcgtgatccgcagcaggcgccggcgggcgacacgctgctgaactggctgtttccgctccataccggcgaggccttcgggctgccggggcgggtgtttatcacgctgttcgggctggcgccgctggcgtttgccgtgaccggcgtgctgatctggtggaagcggcggcggggtcatcagcggcatgtggtgaaggccgcacagcgatccggcatgcgccgggcatgaaaaaagcaggccgccggcctgctttttttgcctggtgcggcgctgccgctcagatttccaggttatcgatcagccgggtcgcgcccagcttggcggcagtcaggattaccagcggctcgccggcgaggaattcctcgcgcgtcggcgcctgcaggtcgacgcgcttgcggatcgacacgtagtccggcttccagccgcgcctggccagcgattccttcgcattcgcctcgaccgcaagcaggtcggccgaagcgcggtcgctgcccagcacggtgtcgcgcacgtcatgcagcgtgcggtacagcaccggcgcctcggcgcgctcgtcggggctcaggtagcggttgcgcgacgacagcgccaggccgtcttcggcacggatggtctcggcggggatgatgtcgatcggcagggcaaactgctgcaccatgcggcgcacgatcatcagctgctggtagtccttcttgccgaacaccgccacgcgcggctgcgcgcacgagaacagcttcatcaccaccgtgcacacgcccttgaagaagccggggcggaactcgccttccaggatgtcgcccaggtcatgcggcggctcgacgcggtattcctgcggttcggggtacatatcgcgctcggacggcgcgaacagcacgtagacgccttccttctgcagtttctcgatatcgtcctgcagcgtgcgcgggtacttgtcgaaatcctcgttcgggccgaactgcaggcggttcacgaagatcgatgccaccaccgggtcgccgtgctggcgcgccaggcgcatcagcgacaggtggccttcgtgcaggttgcccatggtgggcacgaaggcagcgcggttctggccgcgcagttggtcgcgcagctcttggatggaggaaatgactttcatctgccttggtgtgctggtcgtggtaggtgtgacccgggcgccggtccgtcgaggggcggcacatggactaccggtctcggccttctgtcgggcgcggggccttcgggcacttgccttcggggcctgcaccgtgggccattgggccggctgtcggcggattgtagaacatgttgggacggggccggaccccgcagcgcgggtgggtcaggtcgggctgtacgccaatcgcacataaattggggcgaacggttcggcctgggtgatctccaccagcgcttcgcgcgacagctccagcatggcgataaagttcaccaccaccaccggcacgcccttgccggagcgcaccgcgtcctcgaacagctcggagaattccatgaagcgcgcgtgttgcaagcggcgcaggatctggctcatgtgctcgcgcaccgacagttcctcgcgcgagatcttgtggtgctggttgagcttggcgcgcttgagcacatcggcccaggcggcctgcaggtcgatcgtctccacttccgggaagcgcggcgccaggctctgctcgatatagacctgcgagcgcaggaagtcgcggcccagctgcggcaccgtgtccaggcgctgcgcggccagcttcatctgctcgtactccagcaggcggcgcaccagctcggcgcgcgggtcctcggcctcatcgtcgctgtcggccttcttgaccggcagcagcatgcgcgacttgatctcgatcagcatggccgccatcagcaggtattcggcggccagctcgaggttggtcttgcggatctgctcgatgtaggacagatactgccgcgtgacctgcgacatcgggatgtcgaggacattgaagttctgcttgcggatcaggtacagcagcaggtccagcgggccctcgaaggcttccaggaagatctcgagcgcgtccggcgggatgtacaggtcctgcggcagcttgaacagcggctcgccgtacaggcgcgcgaaggccatcccgtcgaccatgtcggcggggccggcagggccggctgcaacggccggggccacggcaggcagctcgacgggcagcggcagcttgtcctggtcgcctgcgctcatgggcggcgtgcgctcgcgggggcggcgggaatcagttgtcctgcgcgtagacgtatggcttctgcgccacgcgcgaagcttcggcgcgggcgcgctcttccaggtcgatcggcgacttgtcccacagcagggcacggccgtcgcgctgttcggcctccagcgtcgggcgctcttgcttgagctgcttcaggaactgggtgatatcggattcgtagatggccatgttcaaccgtgatgcgcccgcgcgggcgccagataggtacagtgggccacgattttacagtatcggccccccggaatgcatccgggccgggtgcaaggcgccggaaagttccgggcataaggccgggtgtggtcaaataccgactttgtatgtgtggacaatcggcgatgccgcaagacaccgctattaccgctgactccgctggccgcgcgcgcgtggccgttcgcgtactggccgcgctgggcgcggtgctggcgctggcggccgccccggcgcgcgccgcctacaaggtcgaagtcgaggcgcccaagccgatccgcgagatgctggaagagcatctggacctggcacgctaccaggaccgcgccgacctttcgccggaccagctcgactatatgatcgagaccgtcggcgagcaggtgcgggcgttcacctcaaccgagggctacttcgacccgaccaccaccacccgcgtggaaggcgagggcgacaagcgcgtggtccacgtgatggtcgaccccggcgcgcgcacgctgatccgcaatgtcgacgtccaggtgacgggcccggcggccacgcgttcgcccgaacaggtggccgagctgcaggccaagtggggactgccggtgggcgagccgttccggcagggcgactgggacaaggccaaggaggacgcgctggtcacgctgcagagccacaattactacggcgcgcgcctggccgcgtcgcaggcgcgcgtggagccggacgaccagcgcgcggacctgtccgcgcattacgccagcggcccggcctacctgctggggccgctgaaggtgaccggcacgcgccgctatccgcaacagatcatctacaacgtcaacccgctgaacgagggcgagccgtaccgcgtggagcggctgctcgagttgcagcgcgcgatccagaaccagccgtacttctccaacgtgcaggtcgacctggaaccgcccccggacgccgacaaggcggcagacggcgtggtgaccgcgccggtctcggtgcgcgtgcgcgaatatccggcgcaccggctcaacagcggcgtgggctttaccaccgacaccggcgcgcagatcgaaggccgctattcgtactacaacctgttcaaccgcgcctggaccttcgactcgcaggcgcggctggagcagaagcgctcctatctgttcgccgaggccgcgatgcccccggacaggggcaactaccgcaacagcgtgtacagcagctacgagcgcaccatcgacatcgagaacaccgacaccaccagcctgcgcgcgggcctgaagcgctcgcgctcgcgcgagaagtacgacgtgacgacgtcgctggatttctactacgacaagctgctgccggagggccaggccgcccagatcagcaaggcgctggtgccggcctttgcctggacgcggcgcgacgtcgacaatcccgtgttcccgcgccgcggcaacgtgatcagcacccagatcggggtggccgccaggggattcctcagcgatgccacattcctgcggctgtacggccgtatccgccagtacataccggtgggcaagcgcgacctggtggtggcacggctggaactcggtgccgacctgaccggcgacagctccagccagatcccggccacgctgcgcttccgcgccggcggcaccgattcgattcggggctacacctaccagtcgatcggcacgcccagcggctccagcatcttgccggccaagtacctgggcaccggcagcctggagtaccagtactggttcaagccggactggggcgtggcggtgttctgggatctcggcaccgccgccgacaacctgcgcggcgtgaccatctacaacggcgtgggcgtcggcgtgcgctggcgcacgccggtgggcccgctgcagctggacgtgggctacggcatccaggagcagcagttccgcccgcatatctcgctgggggtggcgttctgatgcggcacccttgtatttcacgcctgacccggatgccggcatgagcgcccacgatctgccttcggtgcccggcggcgattcggcccggaccccgatcccgcccgcgccgcgcaagcggcggcggctgtggcgcgtgctggcctggctggtcggcatcctgctgctgctgatggtggcgctggcggcggcgggcgtggcggcgctgcgcaccgagaccggcacccgccacctgtggacgctggccacgcggctgtcggccggcatgctcagcggccggctggaaggcggcaccgtggcgcacggcctgcgcctgcgcgacgtggtgttcgccagcggccagacgcgcgtggcggtggaccgcgtggatggcaactgggtgctcggctggcaggcgcggcgcctgcacgtgcaatggctgcgcattggcaaggccgaagtgaagctcggcccgtccgagccgagcaccgagccgatgcagaagcccacctcgctcgaactgccgctggccatcgatgtcgattcgctgacgcttgagcggctgtcgctgctgcagggtacggcgcccacggccgagccgatggtgttcagcaacctggccggcgcgctgcacagcgacggccagcgccaccgcgtcagcgtggacaagctggaaacaccatacggcaagctggcagccaacgcccagctgggcgcacgcgccccgttcgcgctcagcgccgaagccttgctggaaagcagctggcaggatgaggcctttgccgtcaatgccaccgccaagggcaacctggacgcgctgcgagccgagctgcaggccagcggcgaccgcatccacctgcgcgccggcgccgacctgacgccgttcggcaaggtgccgttcacgcacctgctggtcgatggcgatcgcatcaacccgcgcctgttcagcccgtcggcgccacaggccaacctgaccgtgcatgccgagctgcggccggtgggcggcgtggcggcggctgccggcgcgcaggcggccagcgccgtgtcggcatcgccccccccggcggcatcgggggtctccgcatccgcccctgcggccgcgcctgcgcccgcaccgctggctgtcgccggcgacatcgagatcagcaacctggaagccggtccgctggacaaggagcggctgccggtgcagtcggtgcgcgcccatgtcgagctgagcgagatggcacaggccgtctcggacctgcgcgtggcgctggccggcaaggccgagatctccggcggcggttcgctgcgcggcggccgtggcggtttcgacctggacgtgcgcaggctggacccggccgcgctgcatggctcgctgaccagcgccagcctgtccggcccggtggtggtgcggatggagccgggccggcaaagcgtggcgctggacctgtcgggcgggccgctcaagcttttcgccgatgccagcatcgatgccgaggcgctcacgctggccacgctgcgcgccgcggtggggccgggtttgctgaccgcggaaggcaagctcggcctgaaggacaagcagccgttcagcttcaagggcaagctggcctcgttcgatccctcgcgcctggccaaggttgccgccggccgcatcaatgcggacttcaccgcgaccggcgagatcgcgcccgaactcggtgtggcgctggatttcgccgtgcatgagagcgaatacgcgggcctgccgatgaccggcggcggcaaggtgcgcctggcggacgagcggctcttgccgagcgaggcttcgctcagcatggccggcaaccaggccaacctgcgcggcagcttcggcgcgcgcggcgatgcgctcaagctggcggtcgatgcgccgcagctggagcggctcaagtttggcgtggccggcaagctcaagctcgacgccaccatcaccggcacgctgaagaaacccgaagtggtggccgactacaacgcgcaggcgctggaaatgggcccgcacaaggtggccagcgccagcggccgcgccgaggtgcgcggcggcctggacggcccgctctcggtgcagctggccgcgcgcgactaccgcggcccgcaggccagcctgagcacgctcgacgccacgctcgacggcacccaggccaaccataccttcgacgtcaaggcggccggcagcctgaacaagcggccattgcagctggcgctggcggggcagggcgcgtggaagggcaaggacggctggaacggcaccatccgcacgctggaagagcgcggcaccgtcaacctgcgcctggccgcgccgacgcagctgctggtggccgaccagcgggtgcgcctgggcgcggcgcgcctgctgctggaccgcgccacgctgaccatcgacagcctcgactgggaccacggccgcatccgcagcgcgggcagcctggacggcctgcaggtgggccatgtgctggaactgatggaaaccatcaccggcgagaagccgccggtgcgctccgacctggtcatcgacggccgctggaacctggcgctggccgagaccgcgaccggctttgccgaactgcgccggcgcagcggcgacctctcggtcaacgccggccggggcttcaccacgctcggcctgggcgagaccagcctgcgcgccgacgccggcggcaaccgtatcgcaatgcgcggcggcatggtgtcgggccgcatcggcaaggtggtggtggacgcctccgccggactggtgcaggagcaggggctgcagaccgtgggcccggcctcgaccctgggcggcacggtcaccgtcgacgtgccgcggctgaaatcgctggaagcgctgaccggcccgcagtacgctttcgacggcaaactggccgcggcgatgcgcctggccggcacgatcggcgcgccgctgctgaccggcaccgtcgacggcgacaacctcgccgtcacgctgtacgacctgggcctgcgcctgaccgacggcactgtgcgcgtggtgctggaccagaacacggtcgagctcaagcacgtggaattccacggcggcgacggcaagatcacggccaccggcaacgtcaagctgggcgaggccgatcccaacctgaccggcaagatcgtcgccgacaagctgcagctgttcgccagccccgagcgcacgctggtggtctcgggcgacgccaccatcgccaacgagaacaagcaggtcgtgatccgcggcaagatccatgtcgaccgcggcctgttcgacctgcccaaggccggcgcgccggtgctgggcgacgatgtggtggtgatccggcgcaaggaccagcgcgccgttaagactgccgccacgcaggcgccggagaccaagccggcaagcaagttcagcccggtgatcgacctgaccgtggacctgggcaacaacttccgcttccggggcgcgggcgcggacctgttgctggccggccagatgggtgtcaagagcgaacccctggtaccgatgaaggccaccggcacggtgcgcgtgaccgacggcacctatgaagccttcgggcgcaagctggacatcgagcgcggcatcatcaacttcaacggcccgatcgacaacccgaacatgaacatccgcgccatgcgccgcaaccaggaagtggaggcgggcgtggaggtgaccggcacggtgcggctgccgcgcgtgcggctggtgtcggaacccaatgtgccggatgaggataagctctcgtggctgatgttcggctacggcgcggaaagcgccggtgccggccagcagcgccagctgggtggcgccgcgctgggcggcgcggcgctgggcatgatcggcggcaaggccggcaagggcatcgtgcagcatttcggcatcgacgaattctcgatcgggcccagcaccgcgggtctcaatgaccagcaggtggtcagcatgggcaaggccattaccgagcgtatgtcggtaggctatgagcagagcctgacatcggcctcgaacgtggtgaagctcacctggcagttctcacggcgctggtcgctgattgccaagggcgggtccatcaacggtttgtcggtcttgttcaaccgccgcttcgacagctgggcgaacctgttcagcgggacctcgggtcgcagcgacaccagaaggagccagcaggatgagagccagccaaccagtcccgacagcgcggcacaggcagcctcggcagtcatttccgagcccgtgcgccgctgacgtgcgcccctccactttcgcgtcgccgcgacgccttgccgccatgggactctttgcctctttgcttgcgctgttcggctgcgaccagcagaaggtcgatgaagccatgaagaaggcgggcgagaccgcccgcaacacctggaacgcgatcaagcccgacagcgagctgttcaagggcatcgtccccggtcagtccaccgaggaagacctgcggcgccaggccggcaagccggagatcgtctgggaagaagcggacggcgggcgccggcttgaatacccgcgcggccccgagggcaccaccacctggatggtcaccatcagtgccgatggcaaggtcgcgaagatcgagcaggtgctgtcggccgagaacttcgcccgcgtgcgcgccggcatgagcaaggacgacatccgccgcctgctgggcaagcccaccaaggtggaggcatttgcgctgaagaaggaagaggtgtggggctaccgctggatggaaaccgccaccgacaaggccttcttcaacgtgcatttcaacagcgacggcaccgtcaccacgacctcgcgcagcgacgatccgtcgaagatgcagggcggctgacgcatgccccggcggtcaatggagcaggtggcaggcggccacgtgcgccggcgcggctgagccggcggccgggtccagccgcagcatgcgggggatctcggtggcgcaggccggcaccgcgcgcgggcagcgcggatggaacttgcagcccgctggcgggttcagcgccgagccgatatcgcccaggatcagcccctcggccggctggtggtcggggtcgggccgcggcgccgagcccagcaatgcctgcgtgtaggggtggcgcggggtgctgaacaccgcggcgctgggcccgctttcggccatattgcccaggtacatcacgcccacggccgagctgaagtgctccaccagcgccaggtcatgggcgatcaccacataggccaggccgaagctgcgctggatatcggacagcaggttgacgatctgcgcccggatcgagacatccagcgccgaggtgggctcgtccagcacgatcagccgcggctgcagcgccagcgcgcgcgccacggcaatgcgctggcgctggccgccgctgaactcgtgcgggtacaggtcgagcgcgccgggcggcaggccgacgatctccagcagctccagcagccgccggcgcagcgcggcgcggtcgccgccctggccgtgcgcaagcagcggctcggccagcagcatgcccactttcaggcgcggattgagcgaggacgacgggtcctggaacaccgcctgcacctggcgccggtagcccagcacgcccttgcggtccagcgccagtacgtcctggccgtcgaagcggatggtgccggcgctggggcgctcaagcagcagcagctgcctggcgatggtggtcttgccgcagccggactcgcccaccagcgcataggtctggccggcatccacggcaaagctgacgccgtcgacggcgcgcactgtgccgccgccgcgcgcggggaaatgcttcttcaggttttcgacttcgagcagcatggcgcctcctgggttctcagccggccgaagccagccagcagctgaccttgtggccggattcaagttcgatctcggggggataggcgtcatcgcacagcggcttgcggtgcgggcagcgcgccgcgaagcggcagccgtgcggcgggtcgatcaggctgggcgggctgccctggatggcgtagagccgctcgcgtttttcgccgaagtggggaatggcctggagcagggcctgcgtgtagggatgggcggggcgctggtacagcgtgcgcacatcgccggtctcgacaatgcgcccggcgtacatcaccgccacccggtggcagatgctggccgccacgcccaggtcgtgcgtgatcaggatgatgccgacaccggtctgcgcctggatcttgcggaacagcgccatgatctgcacctggatggtcacgtccagtgccgaggtgggttcgtccgccaccagcaggcgcggcgcgctggcaatggccatgccggtcaccacgcgctggcgcatgccgccgctgaactggtgcggatagtcgtccagccgcgtctcgggcgaggggatgcgcacgctgtccagcacctgcaccacctggcgccggcgcgcctcgcggctgtcggcgcggccatggtagcgcagcggcgcgccgacctggtcgcccaccgtgaagaccgggttcagcgaggtcagcgggtcctgcgagatcatcgcgatcttgcggccgcggtactgcgtgctcatggtcttctcgggcagctgcagcaggtccacgccatcgagcagcaccttgccgcccagttgcacgccgccctggcgcggcagcaggcgcaggatggacagaatggtcatggacttgccggagccggattcgcccaccacgcccagggtctcgccttcatgcacgtgcaggtcgacgccgtccacggcgcgcaccgtgccgcggcgcagtcctaggtgcgtggtcagcccctgcaccgacagcatgggcgcgccgcggggggagcccccggcggcgggcgttggcgacgggcgttgcgtcacgtgcgggtcggggccggtcatagctgcctccttttcgggtcgaagtggtcgcgcagccagtcgcccagcaggttggacgccaggcaggtggccatgatggccagtccgggcatggtgatggcccaccacgcgttggtgatgtagttgcgcgcatcggccagcatcagcccccatgacacatcgggttgctggatgccaaggccgagaaagctgagcgaggcctcgaagatgatcacctggcccacctgcagcgtggccagcaccagcagggtgttgagcaggttgggcagcaggtggcggcggaagatggtgagcgtgccgcagccggccacgcgcgccagcgccacgtagtcgcgctgcttgagcgacatcacctcgccgcgcacgatgcgcgcgtaccaggtccagtaggtcaccacgatcaccagcaccacggtattgaagcccgggcccagcaccgcggccagcaccagcgccagcgccagcgcggggatcgacatctggatatcgaccagccgcatgatgagcgcgtccaggcgcccgccgaagtagccggccagcatgccggcggcggtgccgatgccgcccgagatcaggatggcgtacagcgcgaccaccagcgagatgcgcgtgccggccatgatgcgcgagagcaggtcgcgccccatgttgtcggtgcccagcggataggcccagctgccgccctccagccaggccggcggctggaaggccaggccgaggtcgaggccgttggggtcgtgcggcagcagcgcctcgccgccgacggcgcagaccagcagcaccgggaagattgccagcgcaaaccagggcaggccacccaggtcacgccgctggcgcttgcgggccggcgccgccgtggcgctggcgggaggagcggtgatctcaggcatggcggatcctcgggtcgatcaggccgtagctcaggtcgaccagcaggttggacagcacgaacagcacggaggtgagcatcacccccgcctgcaccacgggaaaatcgcgcgcgaacacggcctcgaccacggtgcggccaacgcctggccaggcgaagatgacttcgaccacgaaggcgccgcccagcatcgccgcgaagtacacgccgaggatggtcaccagcggaatcgccgcgttgcgcagcgcgtacttccagatcagcacgcgctcgggcaggcccatggcgcggcccatgcggatgtagtcgctgtccagcacatccagcatggccgagcgcaccacgcgggtctgcgccgccaccggataccagcccagcgcaatcgcgggcagcaccaggctgttccacgaatcgcgcccgaacgcgggcagccagttcagctgcaccgcgaagaacaggatcagcagcagtccgacccagaagttgggcatggcctggccgagcatggcgaagaccttggcaaagcggtcgaaccaggagccgcggtagaccgccgacagcacgccgaacggcaccgccatcgcaatcgagaagcccagcgcggccagcgccagctccaccgtggccggcagccgctccaggatcagccccagtgccggttcctgccagcggtaggagttgccgaagtcgccggtgacggcatggccgaggaagaccaggtactgcgccaccaggggctggtccaggccgagatggcggcgcgttgcctcgatcacctgcggcggcgcgtcggccggcagcagcaaggcaagcgggtcgccggacaggcgcgagatcaggaagatgatcacgctcgcgccaaggatgctgatcaggccgtgcagcacgcgttttgcaataggcatgacaggctccgtcggagattcgtcagcgggaatgccgcgcccggcacgggcgccgggcgcggcggcggatcagcgctgcttccagctgacttcctggaacgagcgccagtagtcgcggatgggccagggcacgtagtcgatcttgttgtcgcgccaggcaaaggtcaccagcggccggtaggtcggcaggccacccagcacgcgctcctgcttgagccgcgcgatctggcgcagcagcgcggtgcgcgccgcggggtccatggtctggcgctgcttctccagcagcgcgtcgacctcggggtcgctggtgtaggaataagtgccccagccgccgccgccctggtagctgtgcaaatggccggaccaggccaggcccgggtcgccgggcaggccctgcgaccacatccagctcagcacgccgtccatctccggcgggcccgagcggccgcgcttgcccaggctgatccaggccccgtactccaggttgcgcacctggcagcggatgcccacggaactcaggtaggcatacatggcttcgcccacttccttcacgccaggttcgcgcggcgtggtgaggttgtagcagggggtctcgaagccattggggtagcccgcctgcctgagcagctcgcgcgcacgcttctggtcgaaggcgtagggcttgagctcggggtcgtagccattcgactccttgcccacctgcgcatagcgctcgccctggccgaacagcacgcgcttgatgatggcgtcgacatcgatggcgtgcgcggccgcctgccgcacgcgcacatcgttgaacggcgacttcggcatctgcgtattgaaattgaggaagaggttgttgccgctcaccagcgtgacggtcttcacgcccggcatcttcttgaactcttcgaccatcgaaggcggcacgttgtcgatgaaatcgaccttgccggtcttgaaggccgccacccgggtcaggtcctcgggaatcaccttgatggtcagctccttgacgccgggccgtttctccttgttccagtagccgtcaaaggcttccagcttcagctcgtccttgaccgtgcgcgagacaaacttccatggcccggtgccgaccggcttgcgggcgaactcttcttcgccgaccttctggatgtacttcttgggcatggcccacagctgcatgttgccgacgatgaactgcgcatccggctccttgaaatgcagcctgaagcggtgcgcatccacgatctcgaaacgctcgaccgacgagacatagtgcgagaagaagctgctcttggggtcgcgctggcgttgccaggagaactcgaggtcctcggaggtcagcgggtcgccgttgtggaagcgcacgcccttgcgcagctgcacgtcgagcacgggcttgccgtccttgccggtttccagcttccagttctccgccagccagttctcgtccttgagcgcggcattgcggcgcaccagcatctcgaagatctggccgacaaagtagtggtcgacgccggccgagatcttgaccggatcgagcgtggtcgactccgcgccgaaggcgacggtgaggctgccggtggccggcgagggcggggcggcctgggccgcggggatggtggcggcggccagcatgccggccagcaggcggcgccgggcggcgtcggtcaactttacttgcatggtgctcctcctgttgcgccgtctcgtggcggcgctgttggtgtgaacaacggatgcgctcagcgcgggaagctgccttccagctggcgtaccacctccagcaggcgcgggcgcacctcgtcgagcaggaatgacggggacagccggaacgacggtccgcccacgttgatggccataggcggcatgccatggccgggctcgaagccgcgcgcaatgccgttgacgtctggctgccactcgcccatcgagcaggtcacgcccagggtgaggtggtccgccaggccctgttcgatgccctggcgcaggcgcggccacgccatgtcgtcgacgtcgcgcacctgttccatgaaggcctgccgctcttcgtccggcaccaccgccagccaggcgcggccgatggccgaggtggcgaccggaatgcgcgagccggtatcgagcgtcagcgcaatcgcggcgcagctgcggcagtgctcgacatagatcatcgagaaccggtcgcgcgtgcccagcgacaccgtgccgccggaaaagtccgccagctcctgcatcagcggtcgcgccaccttgcggatgtccagccgagacagcatggcgctgcccagccgcaggcaggccgtgcccaggctgtacttgtggctgccttcggcctgcgccagatagcccagccgggtcagggtggaggtcaggcgcgatacggtcgacttgggcagtccgcagcgccgggcgatttcctggttgccgagcacgcggtcgctggtgcggaagcaggccagcacttccagcccgcgcgccagcgcggtgacgaagtggcggtcttccttgaaggcattgccggtggatcggtcctgcataaccgttggctccctcgttgtgccgttgcacgccagccgcgcttgttcgacgcgcaggcgtgccggacgcgcgctcggcgtcctcgtccggtacggcggtactacccgacagcggtcccgttcagccgccggcctcggtatccagcaaggcctgcagctcgaccttgcgcaccttgccggtggcggtcagcgggaactcgggcaggatgcggatctcgggcaccttgtagaccgccatctgctcgcggcaccatgcatgcagcgtgtcggcagtgatgccgtcggcgtgctcggcgcgcaggcggataaaggccaccggcacctggcccttgtccgggtcggggcggcccaccaccgccgagcccagcaccgccggatgacgcgacagcagcacctccagctcggacgggaacacgctcatgccgcgcaccttgagcatctccttgcgccgtcccaggaaatgcaggtagcccgcctcgtcataggcaccgatatcgccggtgcggaaccagccgtcgcggaatacctcggcatcgacgtcggggcggccccagtagcccttgaacagcgacggcgtgctgaccacgatctcgccttccgcgccgaccggcagcaccgcgccggtgtcgaagtcgcagatcttgatgcgcgtgcccggcaccggcaggccgacaaagaccgggcggccgcgcaggtccatgtcgtcgtcctgcatgccggtggtgaaggtgtcgctggtatgggtctcggtcatgccccaggcgccttcggcgatgatgctgccggtcagcgcgtgccagcgctggcggatgtcgggggtgatcttgcggatgaacgaggcggcgcgcgtgtgctgcagcgaacgcaggtcgtagcggccggattcggggtggttcatcagctcgaccgcgttgtccaccaccacgaaggtgcggttgacgcgatagcgctcgatcgcggccatcaccgcgaccgggtcccagcgcgccagcagcaccacggtcgcgccgctgaagatcgggtagatcagcccgaggttctcgcccgcgatccagaacatcggcaggaagttcagcatcacgtcgccggagccttctgccagccgttccgcatcgacaccgccggtgagcgcgtaggaagccgccgcggtgtagaccatgtcgcgctgcgtgtgcatgcagcccttgggcaggccggtggtgccgccggtgtagttcagtgcggccagcgcgtccatgtcgaccgggggcagtgcgaccggcgcggtgtcgcgcagtgcctgcagcaggtcgatggtgccttccacggccagcgggggcgcgtcgaggcccgctggcagcggcaggtccggctgtgccggcaacatcgcgccggcactggtggtgtagacggtgcgcagccgcgtctgcgcgcgcaccgacatcagcagcggcgcaagctggtcctgcacgatgacggtggtggcgccggcatcgttcagttcgtagaccagctcctgttccttgaagagcgggttgaccggcacatagaccgcgcccagcttcaggatgccgtagaagaccacgtggaactgcgggcagttgcccatcatcaccgctacccggtcacccgcgcccacgccgcggcccttgagcagcgcggcgcagcgctcggacaggttgtcgagctcggcataggtcacggtggtgccgtaccagaccagcgcggcgtggtccgggcgcttgcgcgcccacgcgcgcaggtagtcgcccagcggggcctcgccatgggggtagaccggtgcgtcgggcaggcctgcgggccagatcttgcgatgccgggcttccaggtcctcgaagaacgcctgttcgttcatctgctgtctcctcttgctttcgctctggttctgtccgccgccgcgcctaccaggcgtcgacgaaggtgcgcatcgggcgctggggattggcggcaccggcctcgagcccgctgaccacccactggcgggtggcggcggggtcgatcacggcgtccagctccaatgccgcagcggcgttgatggcatggccgcgctcgtacatctgcgccaccagctgttggtacagcgcatcgcgctgcgggccggccggcagcgcttccagctccttgcggaagcccagccgcaccgcgccctccaggcccatgccgccgaattcgccggttggccacgagaccgtgaaggttggcgcgcggaagccgcccgcggccatcgccatcgcgcccaggccgtagcccttgcgcagtaccaccgccaggaacggcacgcgcagcttggcgccggcgacgaacatgcgcgacacatggcgcacctgggcgcgggcctcgacctccgggcccaccatgaagcccggcgtgtcgatcaacgatacgatcggcagcccgtgcgcattgcacacctgcatgaagcgcgcggccttgtcggcggcgtcggcatcgatggcgccgccgaggtggcgcgggttgttggcgagaatgccgacgggccggccttcgatgcgcgccagcgcggtgtggatgccggtgccgaagccggcgcgcagttccagcacgctgcccgcgtcggccaggccggcgatggcggcgcgcgtgtcgtagacgcgcaggcggttttccggcaccacctggcgcagcgccagcgtgtcaggcgcctgccagtcgtcgacacggccctggaacatcgacaggtaatgcctggccgcggccaccgcgtcggcctcatcgtcgaccagcaggtcgaccacgccgttgtggtactgcaccgtggccgggccgatatcctcggggcggaacacgcccaggccgccgccctcgatcatggccgggccggccatgccgatattggcgttgcgcgtggcgatgatcaggtcgcaacagcccagcagcgcggcattgccggcaaagcagcgcccggaggcgatgcccaccaccggcacttcgccgctgagctcggcgaaggcggcgaacgaaggctggtacaggccggccacggtggggaagtcgatgtcgcccgggcggccgccgccgccttcggcaaagatcaccgtgggcagccggttccgcagcgccacctccaggatgcggtcggtcttgatatggttgcgcttgccctgggtgccggccagcacggtggcgtcgtaggccagcaccgcgcagcgcgcgcgctccggtgcgaacaggctgccgttgacggcgccggtgccggtgatcagcccgtcggcaggggtgttggcgatcaggtcggcctcgctgcgccggctggcctgtgccgccagcgccaggccgccgtattcgcggaagctgccggcatcgcacaggtcgtcgacgttttcgcgcgcggtgcgctggccgcgcgcatggcggcgtgccacggcctcggggcgggccgcgtcgtacaggaaggcatggcggtcgagcacgcgctgcaggtcggcgcggatcgccgacgggtcggtgtgctcggcctcgccatcggcatgggcgccggcgtcggcaggctccagcaccagcatgacctggccctcggcgacttgctcgccggaagcggtgcgcaggtcgatcacgcggcccgcatgctcggccacgatggcatgttccatcttcatcgcatcgagcacggccacggtctggccggccttgaccaggtcgttctcgcgcgccagttcgatcacgcgtccgttcatggacgcgcgcaccgcgcacaggccctcgcccagtcgctcctcgaagcttgccgtgctggaaggtgccgccaccctgggggcgctgcctcctgcgagggcctgccgcgccgcgtcctgcgccgcaatctgcgcggcgcgttccagcagggcgggcagcgcggcttccatatagcgcgtatgcacgtgctggctggcaaagtcgtcgcgctcggccagcgcccgcagcaggtcgaggttggtgacgatgccgccgatattgaattccccgagcgcgcgctgcaggcgccgcactgcgtcagcgaagttgtcgctggccgaggtgacgatcagcttggccagcagcgtgtcgtaatgcgcggacggtgcatagccggtatagccgtgggtgtcgacgcgcacgtccggcccggtgggcggatcgaaacgctccagccgcccctgtgccggacgtgccagcccttgcgcgtcggtggcctcggcattcacgcgcacctggatggcatagccgcgcacgcgcggcgggtgctgcgggtccagccccagttccgccaggcgccggccttcggccagccccagctgcacggccaccaggtccacgccggtgacctgctcggtgacggtgtgctcgacctgcaggcgcgggttggcttcgataaagacaaagggcagggccgcgccatcgcggcgcgcaccttcctcgggctcttcgaccaggaattcaaacgtgcccaggctgcggtagcgcgcttcgcgcgccagcgtgcaggcggcatcgacaatgcgccggcgcagcgccggatcgagcgccgggctgggcgcgatctcgaccactttctggaagcggcgttgcagcgtgcagtcacgctcgcccagtgcgatcacatggtggccgtcgccggcgatctgcacttcgatatggcgcgcgcgggccaccagccgttcggcgtagatggcatcgatgccgaaggccgagcgtgcttcggagcggcagcgcgcataggcttcgggcagcgcgtcgcgctcgcgcaccacgcgcatgccgcgcccgccgccgccgcccaccgccttgagcaccacgccggcgccgtcctgttcgtcgaagaatgcggtcaccgcatcgagcgtggcgccgcccgcggtggcgggcatcaccggtatgccgcagcgcgcggccagcgccagcgcgcggcccttgtcgccgaacagggccagctgttcgggctcggggccgacaaagatgatctccgcggctgcgcaagcgctggcaaagtcggcgcgctcgctgagaaagccatagccagggtggatggcgtcgcagccggtggcgcgcgctgcgctgatgatggcgggaatgtcgagataggcagcggccccctggccctgcagcgcgacagcttcgtcggccagcaggcggtgccggctggcatcgtcgtcggtggcatagaccgccacggtggcgatgccaaggtctcgtgcggcgcgctgcacgcgcaacgcgatctcgccacgattggcgatcaggagcttcttcacaaatgtccccttccatgcgaagcggcgtcgcgcaagcagcgttgcgtggccggcttctgttttttggtttgtgattctgcgaggtggaatctacgcggctcgtccaggggtcacaagcgcgatgcgccagaaccatgtatgacatgccgcgcgtgcatagcgcgcgagcgagggggaggaggggtgctgcccgttctgttctgcattgcagaatctcgggcggtgtggcgggtcgatccagaggcccggctggccttggatcgctaccgatgggacgcgcggaacatggcgttaccgcgggtttgccgccctctcccgccagcgggagaggggaacggcaatgagtgccctgcttcagccgatgcgcatgcccggcaccgcgccctcgtgcggttccaggatatacaggcccggcgtggccttctcatccgccgcagacgcagccagcaccatgccttcggacacgccgaacttcatcttgcgcggggccaggttggccaccaccacggtcagcttgccgaccagctgctccggcgtgtaggccgactggatgccggagaacacattgcgggtgcggccttcgcccagatccagcgtcagctgcagcagcttgttcgaaccttccaccttctggcattcgacgatcttcgcgacgcgcaggtccaccttggcgaagtcgtcgatggtgatggtgtcggcgatcggctcgatcgccgcgcccgcggcggccggcgccgcggttgcctgcagcgattcgcggttggcagccagcagcgcgtcgacctgtttggcatcgacgcgcgtcatcaggtgctggtaggcctgcaccgggctggcggccgacagctgcttgtcgatggcacgccagtccaacggctcgacgttcaggaagcgctcaacgccggcagccacgttcggcaccaccggcttcaggtagaccgtcagcaggcggaaggcttccagcgagaccgagcacgccgcatgcagcgccgcgcgcttgttttcgtccttggccagttcccacggcttctcggtgtcgacgaaggcgttgaccgcatcggtcagctccatcaccaggcgcaacgccttgctgtactcgcgggcttcatagaggtgggcgacctgcggtgcggcctggcgcagctgttcgagcagcgggtgggccagcgcggcctcgtcgaccttgccttcgaaacgcttgaccaggaagcccgcggcgcggctggcgatattgacgtacttgccgatcaggtcgctgttcacgcgcgcaatgaagtcatcgaggttcaggtcgaggtcttccatgctcgcgttgagcttggcggcgaagtagtagcgcagccattccggattcatgccggtgtcgacatagctctgcgcggtgatgaaggtgccgcgcgacttgctcatcttggcgccgtccacggtcaggaagccgtgggcgaacacattggtcggggtgcggtagcccgagaagcgcagcatcgccggccagaacagcgtgtggaagtacaggatgtccttgccgatgaagtggtactgctcggcggtcgaatgcgggccgacccaggcgtcgaagtcgatgcccttctttgcggccaggttctggaagctggcgtagtagccgatcggggcgtccagccacacgtagaagtacttgccgggcgcgccggggatctcgaagccgaagtagggcgcatcgcgcgagatgtcccagtcggacagggtcgaggcctcgccctcggcgcccagccattcctgcatcttgttggcggcctcgggctgggccaggtcggccacccattcgcgcaggaaggtctcgcagcgcggatcggacagcttgaagaagtaatgggccgacgacttgcgcaccggcgtggcgccggacaccaccgaatacgggttcttcaggtcggtcggcacataggtggtgccgcagacctcgcacgagtcgccgtactggtccttggcgccgcacttggggcactcgcccttgatgaagcggtccggcaggaacatgttcttgaccgggtcgaagaactgttcgacctcgcgctcggcgatcaggtcctcggccttcagggccaggtagatcttttcgcacagctcgcggttttcttcagcgtcggtgctgtagtagttgtcgaacgacaccaggaagctgtcgaagtcgcgcttgtgctcggtccagacgcggtctatcagtgccttgggtgtgatgccttccttctcggcgcgcagcatgaccggcgtgccgtgggtgtcgtcggcgccgacgtagtagacctcgttgcccatcatgcgctggaaacgcacccagatatcggtctggatgtattccaccaggtggccgatatggatctggccgttggcataaggcagggcggatgtgacgaggatgcgacgtgcggtcataaacaggagccggtcaggagcggggaaatatcagggggacggcgccagccaggaagggagggcgcgtgccgggaaggggctattttagcaactggccagcgcctgcgcgccggttccgcatggcggaatggcgaaacccacggatccgttcggccaaaaaaaagcgccggtcagaaccggcgcagctttccacaacggaaaaggaggagaaatcaggtaccgcccgggaggtcagccacccatcgcgagccagcaacggtggcaagcggcacctgtttctatgactaggtcatccttgaattggtttcaaaaaaatttcgacgcggcgattttgtgcccgtccggcctcagtgccgttgtccgcaaccggctgggattgcccgcgcccttcggccgtcagtcggttgcgtgcgacgccgcgatcacccaggtagccggccacgctctgggcgcggcgctgcgacagctgcatgttgtagttggggttgccggtgctgtcggtatggcccaccacgttggcgctcacgtcctggtgctggcccagggtctgcgcgacctggtcgagcaccgagcggaacgacggcttgatggtggcgctgtcggtatcgaaggtaacctggctggggatgttgaccttgagcgtgccatccggctgctcggtgatctgagtgcccgtgcccgcggtgtccttgttcagcttgccgcggatggcgttccagttgtagccggttgcgccgccgatggcaccgcccactgccgcgcccaccagcgtgccggtggtattgccgccgatcaggttgccaagcccggcgccgaccgcggcgcccacgccggtgccgactgccgtatgggtttgctgttcagtggcgcaacctgcggccagcagcgtggcagcggtgagcgagacagtaacgagcttgatcttcatgctttctccttctgatgttcccgtaaatgttcttggtaccgcatcgcgatggtaacgccaaggctagcggcaggtaaccctttgtacgcgtcgggcccggccggcccgggcaccgcctgcgatgccggcgtaccgggccgaccaaccgcactacaatatggatatggcggcgcgcgcacaagtgcaagcttgtgagatttgtaaatgtctgtaatcccacaccctatgcagggtattgcgcgcggatttccggcgttcatggccggtgctgcatactttgatacattaggcgcaggccatcatgcgccagtccccccaatcatcgaagcggagtatgtcttgagcgtcagcactgagcaggtcaccgaagccctgcgcaccgtcatcgaccccaatacgggcaaggacctggtgtccacccgctcggccaggaacatccgcgtcgacggcggcgatgtctcgctggaagtcgaactcggctaccccgcgaagagccagttcgatccgatccgcaagctggtggttgctgcagtgcggcaagtgccgggcgtgagcaacgtcagcgtggccgtgaccatgaagatcgtcgcgcacgcggtgcagcgcggggtcaagctgctgccgggcgtgaagaacgtgattgcggtggcgtcgggcaagggcggggtgggcaagtccaccacggccgtgaacctggcgctggcgctggcggcggaaggcgcgcgcgtcggcatgctcgacgcagacatctatgggccgagcctgccgatgatgctgggcatcgacggccgcccggaatccgccgacggccagaccatggagccgctggaagggcacggcctgcaggccaactcgatcggcttcctgatcgagcaggacaacccgatggtatggcgcggcccgatggtcacctcggcgctggagcagctgctgcgccagaccaactggcacgatctggactacctgatcgtcgacatgccgccgggcaccggcgacgtccagctgacgctgtcgcagaaggtgccggtcaccggcgcggtgatcgtcaccacgcctcaggatatcgcgctgctggatgccaagaagggcctgaagatgttcgagaaggtgggcattcccatcctgggcatcgtcgagaacatggcggtctactgctgcccgaactgcggccatgtcgagcatatcttcggccacggcggcggcgagaagatgtgcgccgactacggcgtcgacctgctgggcagcctgccgctgaacctgcagatccgcgagcaggccgactccggccgcccgaccgtggtggccgagcccgacagcccggtggccgggatgtaccgcgccatcgcgcgcaaggtggcgatcaaggtcgccgacaaggcgcgcgacatgaccagcaagtttccgagtatcgtggtgcaaaacacctgagcgcgcgccgcgcgcagcaaccatggaaagccagcctgcccccgacctgccggcacccgctgcccgccccgccgtcaccatggcggtggtgatgcgcaaggtcgcgctggccaaccgctggcagccgtggaagtgggagctggacgcggtgctgccggaccttggcgagttcggcacgcatcccgtgtgcctggagcacgacgcccacggcgcgcactggctctacccgggcttcgaggtgacgttgttccgcgaccagggcgaaggctattacctgaacctgacctcgaccacgccgtgctggttcgtgctgtggcgcatgccagaggacgacggcgctggcgaagaggcccatccggtgccgatgaccgtgacgctgtcgtacaac

(The sequence listing continues in the following parts.)
